United States Patent Application Publication US 2024/0033347 A1 - sequence listing, part 2

SEQ ID NO: 47 - DNA, 198555 bp, Vaccinia virus
  source 1..198555: mol_type = other DNA
  misc_feature 1..198555: note = VIR86
atcaaagagagaaagagaataaaaatatttttgtaaaactttttttatgagaccatcaaagagagaaagagaataaaaatatttttgtaaaactttttttatgagaccatcagaaagaggtttaatatttttgtgataccctgaaaggaaataggaataggaataggaatagtgtcataatcgtatcacactattgagacagaaaaagaagaagtcgcgagaggtaactttttgtgaatgtagttaagaacatttttgttttgcaaaccggaatatagtgtccggtacacttttttaattcgtggtgtgcctgaatcgttcgattaaccctactcatccaatttcagatgaatagagttatcgattcagacacacgctttgagttttgttgaatcgatgagtgaagtatcatcggttgcaccttcagatgccgatccgtcgacatacttgaatccatccttgacctcaagttcagatgattccttgcacatgtctccgatacgaacgctaaactctagattcttgacacattttgtatcgacgatcgttgaaccgatgatatcttcgtaactcactttcttatgagagatgttagacccgagtactggatgggtcttgatgtcgctgtctttctcttcttcgctacatctgatgtcgatagacacctcacagtctttgatcatagcaagagcttcttcatgagtgatcgcgggagagtccttaccttgtcctggggacacgctggacaatctagcattcactgtgtttccatcagcggattctgagatggatttaatctgaggacatttggtgaatccaaagttcattctcagacctccaccgatgatggagtaataagtggtaggaggatctacatcctcgactgatgtggaatcatcttctgattccacctcgggatttggatctgactcggactctgtaatttccgttacggattggcaaatcttatcattggtcggtgtttggtcttgctttgtgactttgataataacatcgattcccatatgatgtttgttttcttcttccgtacacgaggatgaggatgaggatgattgctgaagactggcaggcacatgcatgccaggacgatatattgtttcataattgctattgattgagtactgttctttatgattctacttccttaccatgcaataaattagaatatattttctacttttacgagaaattaattattgtatttattatttatgggtgaaaaacttactataaaaagcgggtgggtttggaattagtgatcagtttatgtatatcgcaactaccgggcatatggctatcgacatcgagaacattacccacatgataagagattgtatcagtttcgtagtcttgagtattggtattactatatagtatatagatgtcgacgctagatatacagtcgcccactagagttactgtctccgaatgcggcatgataccgtcatcattctttgctttcgttaactgtttggaggaagaatctttgttattgcatttaatctcgaaattcagagtgcacacctttctcctgtaaagaaacctgaagttgctaccttattaaggacagagaagtattcctcacgaaatacgggattacagtctttatgattcatagtaatagttagttccgacgttgagatggattcactgagaccggtagtggtcgtccgagtacacgacgtgtcgttgacgggatacagattaatttccacatcgatatagttaaaggtattactgggtacgggttcgcatttatctgcggaagagacggtgtgagaatatgttccgagaccacacggagaacagatgacgtctccggatactccgtatcctattccacattttgtttgggaaacacatgccttgcatccggatgatcctttgagaagacaataatatccgggagagcattcacagattctattgtgagtcgtgttacacgatcgcgtcttccgttacaacttagacaagcgggtaaatgattattgcgagatgtgaaggtacccgaaccacagggtgtacatcgtgtgttagtcttgctatcgcataatctggaagcgtatgttcccggacacaaattatggcgtttgtattcgttgtctttacactttccatcggatggtgcatgcggtgctatatctcttccgtttattattatacatgagagaaacaatatatacgagtataatacggacttcatgatttaataatgtagtaatcgtcgtcttgttcctgtttcctacttctccaatcatatagatattttctttctatcatggataatatttgtaatggttctttccgtacaacatactgtttagatgatattgcgcataatttccggaggcaaatacgatagtctagattgaccgatggtagactctaatttattgagtgctttgtcgacgagtttacttttatgctccatcgatagatggcactgttctatgagatcgtcgtacatgggaaatgaaatgtgtctgtccgaatgtatggctttaagatagctgtgataccgtatacaggtcggtgtcggagattcgaatctctttaaggcgacttatgtcacgatgatggaatctatcttatcgaatgatatatttttcataaatacacttttatagtcctcgtttaaacagaatttactatgtagttccgcgaatgactcgtcccttaataggcagtaggctagtatcttttttacgtagtaatcgtcgtagggagagaattctgacatcttgtagaacaacgatttaatcataggtagagatactttcagtctgtggtggatgatgtcattcacaacatccgccttgtatatgatgtttctgttttcaaacaccaagtcgaataccgtctttagtcggaaggttgatgtcgtatccgatgtatgaggcaacattgttgttacaattttgaaaggcggtattatagtattcgtctttctgaatgtcgaacctatctagtagataccgtagtatattgagagtgtatccttgattatgttttatgaatagataaagtagatgttgtccttcttccttttgttcgtgccaattgagtaacattatgagaatatgacctgttgcacaatcgttccatgatgggtgtacaatcaagattattacgtatcctcgtatcggctcctcgagataaaagagcatacaccacacgaggactatgtttggtatactgttgaaggtaagtgtgtaaccgcgttaatgtttgctccataatctattatcgcgtagatgaatcgcttctcggctcgcatcttagtgtgacttaacttgtaataattgcttttgtagaacgtggatatgtgtttacagtagtaatgaagagaagtgagtccatcctcgtcgacgcaattagggtcggatcctttgtacagaacgtaatagtttaagctcccattgaatttatatctaagataacacagcaatagatcggatgatttactaaagtcatcaatggtgtccgttagtatatcaaagatcttgttatcgattgatagtgaatgaatcagatagtggtgtagaggaatatgtcctttttcatccttgctatcaaagttacgcatgccgtggtgtaacaatatctttaatacagatggattaaatcgtgtattcatcgtatagcaatgtaatggagagttacctcgtttattcagatcgcagtgtttaataactagcttaaacagatgagacgatgtatccacatcaaagaacgtaaaatacatatgacaaacattgttgacagaaacgtgaccttcattcttaccgtcgtccataaatacgttaggtatgtaccacatactgtcgcgaacgatgcgtacaatctcgtccatctcataatgatttactttttcataattaaagatgtgaaagaaaaccgaacaatatatttttttagtaatgtttatgcgagacatataaaataaactccgtgtttatgatgccggtaaatgtttttatcatcttggacggaatcgattttgtaatatgtcatggaaacaaatgaaacaggacattatcgctccatgataaattatttaatggagtaataaagtatctccatgggtaatttcgaaatcaagttatcgtctgtattaatgttgtccactatggagtcgatcctctcattgttctttacagtttctgtaatgatggacgttagttcttttttgtaccatttgatgtcggattctttgcgtatctcaatctgtggcgtttgcttcgtttaaataatatatcaaacatggagacgcctgatatgtaggcattcttcattctattaatgtctactctatagcgctttagttccttatgacgaccggagatatcatacttactttagaaggaaaatcatcatctaggattaaggcgtatctgatacaggcgaataatggttcaggatatagatagcgtatatctctattaaatgcgtcaatcatagtctctagagtgggatggtagctaagtaataaatcaactatcctcgttttgttttctcttctgtaactacttttctggatggccgtattgattatcgagcgtgatgttgtaacactcgctccatattccaataaccgctttgcaaattgtatattattgacatcgaccgcgtaatatagtagagttttattctcattatcgatcatatctatattatccatgtacttgcttagtatatcaaatacatctattagtatggtttcataacagtgatacccgcaattattaaatctcgataatatcagaccgtacatacatagacggccattgttcgatacgtgatttacagccatgtgtccattattttccacgataaaccttacgacgtttacatcgacgagattattattaacaaagtagtcgtgcagaggatagttgttgtccgttatctaacatgcatcgaacgaccatatcgccgtaatgtaagtagtttatcaacatggcttgtacgatggattcatcctgttgtctaaatctctttagaatgttatcgatgatgtagtggttatagtctctggaatcgtaagaagtaatactacgcattacgtcgacaagagtatgacgtctctcaataagaagattaacgatttccatgtctacattatatggggttactctaaatcgcttgtttagataatccgcctctaatatagggctgacgtcgtatactctacacgtgtccacatcctttattaataatttaacaatctctatatctatggttgagcaagaccagtagtattggatgggtaaagatcctccttcgtctctgccatggatggaaacattgttattgatcaaacatttaattacatccttggatagagattgagattctctatgagacgatatatagtaatgaagagagttcttacacatatcactgtcgtacatacaggtacgaaatacgtaaccggtgctgtaacattctgatttaagaagccatagcaatacttctggtctcggattaggcgtcgttacgtatatatccaccaatccgagaccattgattgcataattcgtattcttggacggacgtatccgtttatccacaattaggtattttagcagacgtaagtcgatattatccgaagacatatacgaatacagatcgaaatcatttatattcgacttgagttcgttagaggaattcgaatagctggatatcagtagatgcacaatttgagattttacgtatctatgcttactgtatgctcctagcggagttaatccttcgttgtttctacaaagtctctcgactccgcgagagagtaacagtcgaacaatcttaatgtctgtatcgcatttattgaagacgtaacaatgtagcgcattgtttcctcgtctatctatatgttttgataagttgtgacacgtttcaatttctagttttatttttttgtacgtcacatcttcatccagtagacgacatagaatacatgtgcaatccatagctattctggtgctaattattcctatttcacgaaaaatgatgaaggcaatcattcctcataagatgataaaaagtgtagtgagagagcatgaaggagatttagtatttagcagtgcggatatgatccaagagggtgagatagtcgttctcgttcagaatctttcgcagcataagtagtatgtcgatatacttatcgttgaagactcttccagagacgatagctgattgagtacaaagtccaatgattgcacgaagttcttcggcggttttcatggagtcatttctgatgaaacatttaatgatctccacgcaattgtcgatattgtcccacggaagtgaatccttcaactcaccaccaaagagctccgttgcatcagttctgaaagagatgagaagcctgtagagagaccctgcgctttctctatgggtccatctatgagaaacccacaggatgtattcagtcagacaatgtctgacgtcggccacggtattcagggagtccttagtagcgtggcaatgacagggtctgaactgggcacaaggagaggccattgtaaaggtagacctgtagccgtttatgctaatagagggctttaatttccatttttttaatgggttgtggatgaggaatgagagtgatatcatattgagatacgtagttatgtagaggtgtatttcctatattatttactttcggtttcatattttaccaactctttaataaatttcttttcacgatgcatcttattaaatgacgttttctcataagtggacatatagatgcagaagtaatgaagaaaagtattacctctatcatctacataattagggtctgctcctttttttaacaacttatacagtacgtagtagtagtttatcggttttaaatcaagtctagaatatatagtggattaatatatttttatattagctaaagctatctatactatcagaaagcatatcattctcaacttcatcatgagttaaatatttgtgtaatggatgtcatgaacattaaacgtattcatgacatactcctttaataggttttttaaaacagatgattcaaatccttcattcattagataacagtgtaacggagtcgtaccttctactagtttgtttatatcacagcattctacaaacagtctaaacaatagagaagacggacagactttaacgtataaatgacacatgttatcgatattcgttgatgaattattattaaacgtagttatgataaatgattctaacgacatctctcgctagagataaaatctagtatcgtatcattaaacatctttgcatcatactcgcatagcatagtttttcataattaatacaatatttaaaagacttattcggaaagtattttaatacatgtatcatcgatggagatccatatgaggagtcacttgtagttcttcagtagtaataacagtgctatcatcgatagtataattatatgtagaaggttcatatgttgttgtaattggagtaactgttggtagttcttccgtggaatcaataattatactaacagcaatagtataattatataaatatgttccgttgatatcacatattttaatgaactcatttctaacaccctcagctatatctgtccaattaaatgtagccaacaatctactacgttctctttgattgactacttgtacggtagcgacgctacactatctttattgtcttctacatgctccaattgaatgtcatgatacaacgcagtttttcttatgcatgtttcataacaccacgaacatgtcgcagtaagatatatagccagagataatttctgtaaattcatgattgccggtcataaacaagcccgtcaataattgtggctatatattcagtttatagagcaaaataattaagcacaatagcgcttaatctcaaaatatgttatgtttatttttttcatattaaacatactggttaaaatcctctaaaggctgatcttcatctataaatcaagatcataattacatttagacagtggtttcatgtttataaaaatgttctttttgtgtgaataaggaatatactaatcaataatcaaccatcgaccccattacgatagtatgcaggcaaccccccattagagaggtacgtgtaatcagtctctccagttttagtatttttataagtcattgttacataaacggcttttaaacagtctcctcgataataagccatatctggaaatttattaaatactcgagtcattttacgcacggtcaaaaaagtaagtaatgtcgacgacttcttacattctatagaaacacctagaatactcattttcttttggaaaatatcctcagactctgatttgaacaatgcacgacctatagtaaaccgtgaccaataagttatattagtcaatggtatatccaaaccatcaggtgtggatagtacgccgatagtccagtctttggtatcgatagtgtagttattgaactgagaagttaccgtatagtctttttggtcatctctaaacaaggaaactaatacctctacactattgaacgatttatcttccgtaatgggtggaataacgggaatataaagtggactagcgatggatgaagtcacgaatataagacacgctattaatccgtatatcatcattttgatattacttataataacgatttgtttaatttttagtttatactattaattgtaaatgatattattatttttttaagtattatcagctttagtttatactattactatttgtaatatttagacatagataaacgtgataaaagtctatttgtttatatttattgcggatagcagtatttccctataaaaagtatacgtcctgtgttgtctttaatcatgtacatgaatggatggtttatgtagaccttcgtacgatataccatcgaaaagttagtcataaatactcctgtaacggccgatgcttctgtatactcctcattaacatctataaacgtcgtatgtagaaatttttctacagtgatagtttcattacacatcttgctaaaatctgcataatatccgaatatattagtaagtcctaaattttctaaaatcggtaccagattatacggttctgtcatttccactttaaactttggcatatacaagtctatacttttagtagataacataccacaccattttttaaatttttcatctgttatatttttttctatgttatatataccttctatgtcgtccggtagtataattaccatactagagtttccctcgtatggaatatcgataatagagaatcctccgaataattcattaatatgtacatattgcaagttattctcggtacccaccatcatatcaacactggtaactatattcttagaaatataaaacttgtctgtatatgtaagatgtttagaaaatggatatttccacattgctttaaaatggacggcgctaacaactgtcatacgagtattaatggatagcggactagtcaataaggaattaattttaccatttgtcatcgtcttaacccattcgttgattagttcctttgtttggttagcattattaaagtttacagtttgaaaatcgtcttttattttttgtaggaaggaggcgtggaactcgatactatcgctaccgtatattttatttgcggtagctagtgtcgcacaatacggaatatctacgtccatgtcattattgtcatccttcttatcatcgggtgtattctcattcatattctctatatattttgatagttgttcagctgtagaaccagctgctccatgatttagaatagataaagtagataaaatagaaactggagaaatcaaaacattttcatcagggtgttttaagattagttctttaaagatatccatggtatagaccaaacaataacgataacgatatatatcataaataaataatgttaaatttcagtttatgtttgtaccccgtattcatacttaacaaattggtattgcgtacacaatcaatcatattacataccattaataatgcaagcataaaaaatcgttagtagatgtttctaaatataggttccgtaagcaaagaatataagaatgaagcggtaatgataaaatcaatcgttatctaaaatgatcatactcatttattttattctattatattaacacatacatttttaacagcaacacattcaatattgtattgttatttttatattatttacacaattaacaatatattattagtttatattactgaattaataatataaaattcccaatcttgtcataaacacacactgagaaacagcataaacacaaaatccatcaaaaatgtcgatgaaatatctgatgttgttgttcgctgctatgataatcagatcattcgccgatagtggtaacgctatcgaaacgacattgccagaaattacaaacgctacaacagatattccagctatcagattatgcggtccagagggagatggatattgtttacacggtgactgtatccacgctagagatatcgacggtatgtattgtagatgctctcatggttatacaggcattagatgtcagcatgtagtattagtagactatcaacgttcagaaaaaccaaacactacaacgtcatatatcccatctcccggtattgtgcttgtattagtaggcattattattatgtgttgtctattatctgtttataggttcactcgaagaactaataaactacctctacaagatatggttgtgccataatttttataaatttttttatgagtatttttacaaaaaaaatgtataaagtgtatgtcttatgtatatttataaaaatgctaagtatgcgatgtatctatgttatttgtatttatctaaacaatacctctacctctagatattatacaaaaattttttatttcggcatattaaagtaaaatctagttaccttgaaaatgaatacagtgggtggttccgtatcaccagtaagaacataatagtcgaatacagtatccgattgagattttgcatacaatactagtctagaaagaaatttgtaatcattttctgtgacgggagtccatatatctgtatcatcgtctagtttatcagtgtcccatgctatatttctgttatcatcattagttaatgaaaataactctcgtgcttcagaaaagtcaaatattgtatccatacatacatctccaaaactatcgcttatacgtttatctttaacgatacctatacctagatggttatttactaacagacattttccagatctattgactataactcctatagtttccacatcaaccaagtaatgatcatctattgttatataacaataacataactcttttccatttttatcagtatgtatatctatatcaacgtcgtcgttgtagtgaatagtagtcattgatctattatatgaaacggatatgtctagaacggcaattgtcttacgtccagttaacactttcgttgatttaaagtctagagtctttgcaaacataatatccttatccgactttatatttcctgtagggtggtataattttattttgcctccacatatcggtgtttccaaatatattactagacaatattccatatagttattagttaagggtacccaattagaacacgtacgcttattatcatcatttggatcgtatttcataaaagttattgtactatcgatgtcaacacattctacattttttaatcgtctatatagtatttttctgatattttctataatatcagaattgtcttccatcggaagttgtatactatcggaatcagttacatgtttaaataattctctgatgtcattccttatacaatcaaattcattattaaacagtttaatagtctgtagacctttatcgtcgtaaatatccattgtcttattagttacgcttatttttatgtgttttacgttgctttattatattttataagaatgattgtttgacgaatcacgagaactattaagacacattattaggtatatattataaaaaagtttttgattacgatgttataagaggaaagaggacacattaacatcatacatcaattaactacattcttataacatcgtaatcaaaagaattgcaattttgatgtataacaactgtcaatgggttatggaattgtatattacatattatacggtatgttggtaacgacaaataccgatcggtaatcgtttgccggtgtaatagaattatatatatctatctattacaccggctgagtatacataataataagttgtggtagtatgatctccatatttataatttaggactttgtattcagtatttttggaatcataaaaaataaaaaaaagttttactaatttaaaatttaaaaagtatttacatttttttcactgtttagtcgcggatatggaattcgatcctgccaaaatcaatacatcatctatagatcatgtaacaatattacaatacatagatgaaccaaatgatataagactaacagtatgcattatccgaaatattaataacattacatattatatcaatatcacaaaaataaatacacatttggctaatcaatttcgggcttggaaaaaacgtatcgccggaagggactatatgactaacttatctagagatacaggaatacaacaatcaaaacttactgaaactatacgtaactgtcaaaaaaatagaaacatatatggtctatatatacactacaatttagttattaatgtggttattgattggataaccgatgtgattgttcaatcaatattaagagggttggtaaattggtacatagctaataatacctatactccaaatacacccaataatacaacaaccatttctgagttggatatcatcaaaatactaaataaatacgaggacgtgtatagagtaagtaaagaaaaagaatgtggaatttgctatgaagttgtttactcaaaacgattagaaaacgatagatactttggtttattggattcgtgtactcatatattttgcataacatgcatcaatatatggcataaaacacgaagagaaaccggtgcgtcggataattgtcctatatgtcgtacccgttttagaaacataacaatgagcaagttctataagctagttaactaataaataaaaagtttaatttgttgacgacgtatgtcgttattttttctcgtataaaagattaatttgattctaatataatctttagtattggataaatatcaattcaaattaattccattagattatatcataaataaaaatagtagcacgcactacttcagccaaatattcttttttgaaacgccatctatcgtagtgaggacacaagtgaacctataatgagcaaatttattagtatcggttacatgaaggactttacgtagagtggtgattccactatctgtggtacgaacggtttcatcttctttgatgccatcacccagatgttctataaacttggtatcctcgtccgatttcatatcctttgccaaccaatacatatagctaaactcaggcatatgttccacacatcctgaacaatgaaattctccagaagatgttacaatgtctagatttggacatttggtttcaaccgcgttaacatatgagtgaacacacccatacatgaaagcgatgagaaataggattttcatcttgccaaaatatcactagaaaaaatttatttatcaattttaaaggtataaaaaatacttattgttgctcgaatattttgtatttgatggtatacggaagattagaaatgtaggtattatcatcaactgattctatggttttatgtattctatcatgtttcactattgcgttggaaataatatcatatgcttccacatatattttattttgttttaactcataatactcacgtaattctggattattggcatatctgtgaataattttagctccatgatcagtaaatattaatgagaacatagtattaccacctaccattatttttttcatttcgttcaattcttgattgcaaagatctatataatcattatagcgttgacttatggactctggaatcttagacgatgtacagtcatctataatcatggcatatttaatacattgttttatagcatagtagttatctacgatgttagatatttctctcaatgaatcaatcacacaatctaatgtaggtttatgacataatagcattttcagcagttcaatgtttctagattcgttgatggcaatggctatacatgtatatccgttatttgatctaatgttgacatctgaaccggattctagcagtaaagatactagagattgtttattatatctaacagccttgtgaagaagtgtttctcctcgtttgtcaatcatgttaatgtctttaagataaggtaggcaaatgtttatagtactaagaattgggcaagcataagacatgtcacaaagaccctttttgtatgtataagtgtagaaattataacatccatagttggatttacataggtgtccaatcgggatctctccatcatcgagatgattgacggcatctcccccttccttttttagtagatatttcatcgtgtaagaatcaatattaatatttctaaagtatccgtgtatagcctctttatttaccacagctccatattccaacatgcattccactaaagggatatcgatatcgccgaatgtcatatactcaattagtatatgttggaggacatccgagttcattgttttcaatatcaaagagatggtttccttatcatttctccatagtggtacaatactacacattattccgtgaggctttccattctccaaaaacaatttgaccaaatctacatctttattgtatctataatcactatttagataatcagccataattcctcgagtgcaacatgttagatcgtctatatatgaataagccgtgttatctattcctttcattaacaatttaacgatgtctatatctatatgagatgacttaatataatattgaagagctgtacaatagtttttatctatagaagacggcttgattccgtgattaattagacatttaacaacttccggacgcacatatgctctcgtatccgactctgaatacagatgagagatgatatacagatgcaatacggtaccgcaatttcgtagttgataatcatcatacgcgtatccgtactcgtcctcataaagaacactgcagccattttctatgaacaaatcaataattttaggaacaggatcattgtcattacataattttctataactgaacgatggttttcacatttaacactcaagtcaaatccatgttctaccaacacctttatcaagtcaacgtctacatttttggatttcatatagctgaatatattaaagtcatttatgttgctaaatccagtggcttctagtagagccatcgctatatcctttaactttaacatgtctactatttgtgtattcttctaatggggtagctgtctccaatttttgcgtaatggattagtgccactgtctagtagtagtttgacgacctcgacattattacaatgctcattaaaaaggtatgcgtgtaaagcattattcttgaattggttcctggtatcattaggatctctgtctctcaacatctgtttaagttcatcgagagccacctcctcattttccaaatagtcaaacattttgactgaatagaagtgaatgagctactgtgaactctatacacccacacaactaatgtcattaaatattatttttttgaatgtatttataccatgtcaaaaacttgtacaattattaataaaaataatttagtgtttaaattttaccagttccagattttacacctccgttaaccccactttttacaccactggacgaccctcctccccacattccaccgccaccagatgtataagttttagatcctttattactaccatcatgtccatggataaagacactccacatgccgccactaccccctttagaagacatattaataagacttaagagttaaggacaagtttaacaataaaattaatcacgagtaccctactaccaacctacactattatatgattatagtttctatttttacagtaccttaactaaagtttctagtcacaagagcaatactaccaacctacactattatatgattatagtttctatttttataggaacgcgtacgagaaaatcaaatgtctaatttctaacggtagtgttgataaacgattatcgtcaatggatacctcctctatcatgtcgtctattttcttactttgttctattaacttattagcattatatattatttgattataaaacttatattgcttattagcccaatctgtaaatatcggattattaacatatcgtttctttgtaggtttatttaacttgtacatcactgtaagcatgtccgtaccatttattttaatttgacgcatatccgcaatttctttttcgcagtcggttataaattctatatatgatggatacatgctacatgtgtacttataatcgactaatatgaagtacttgatacatattttcagtaacgatttattattaccacctatgaataagtacctgtgatcgtctaggtaatcaactgttttcttaatacattcgatggttggtaatttactcagaataatttccaatatcttaatatataattctgctatttctggaatatatttatctgccagtataacacaaatagtaatacatgtaaacccatattttgttattatattaatgtctgcgccattatctattaaccattctactaggctgacactatgcgacttaatacaatgataaagtatactacatccatgtttatctattttgtttatatcatcaatatacggcttacaaagttttagtatcgataacacatccaactcacgcatagagaaggtagggaataatggcataatatttattaggttatcatcattgtcattatctacaactaagtttccattttttaaaatatactcgacaactttaggatctctattgccaaatttttgaaaatatttatttatatgcttaaatctatataatgtagctccttcatcaatcatacatttaataacattgatgtatactgtatgataagatacatattctaacaatagatcttgtatagaatctgtatatcttttaagaattgtggatattaggatattattacgtaaactattacacaattctaaaatataaaacgtatcacggtcgaataatagttgatcaactatataattatcgattttgtgatttttcttcctaaactgtttacgtaaatagttagatagaatattcattagttcatgaccactatagttactatcgaataacgcgtcaaatatttcccgtttaatatcgcatttgtcaagataataatagagtgtggtatgttcacgataagtataataacgcatctctttttcgtgtgaaattaaatagtttatcacgtccaaagatgtagcataaccatcttgtgacctagtaataatataataatagagaactgttttacccattctatcatcataatcagtggtgtagtcgtaatcgtaatcgtctaattcatcatcccaattataatattcaccagcacgtctaatctgttctattttgatcttgtatccatactgtatgttgctacatgtaggtattcctttatccaataatagtttaaacacatctacattgggatttgatgttgtagcgtatttctctacaatattaataccatttttgatactatttatttctatacctttcgaaattagtaatttcaataagtctatatcgatgttatcagaacatagatattcgaatatatcaaaatcattgatatttttatagtcgactgacgacaataacaaaatcacaacatcgtttttgatattattatttttcttggtaacgtatgcctttaatggagtttcaccatcatactcatataatggatttgcaccactttctatcaatgattgtgcactgctggcatcgatgttaaatgttttacaactatcatagagtatcttatcgttaaccatgattggttgttgatgctatcgcattttttggtttctttcatttcagttatgtatggatttagcacgtttgggaagcataagctcatatgatttcagtactgtagtgtcagtactattagtttcgatcagatcaatgtctagatctatagaatcaaaacacgataggtcagaagataatgaatatctgtaggcttcttgttgtactgtaacttctcgttttgttagatggttgcatcgtgctttaacatcaatggtacaaattttatcctcgctttgtgtatcatattcgtccctactataaaattgtatattcagattatcatgagatgtgtatacgctaacggtatcaataaacggagcacaccatttagtcataaccgtaatccaaaaatttttaaagtatatcttaacgaaagaagttgtgtcattgtctacggtgtatggtactagatcctcataagtgtatatatctagagtaatgtttaatttatcaaatggttgataatatggatcctcatggcaatttcctaagacgaaaataagacataaacacgcaataaatctaattgcggacatggttactccttaaaaaaatactaataatcaccttggctatttagtaagtgtcatttaacactatactcatattaatccatggactcataatctctatacgggattaacggatgttctatatacggggatgagtagttctcttctttaactttatactttttactaatcatatttagactgatgtatgggtaatagtgtttgaagagctcgttctcatcatcagaataaatcaatatctctgtttttttgttatacagatgtattacagcctcatatattacgtaatagaacgtgtcatctaccttattaactttcaccgcatagttgtttgcaaatacggttaatcctttgacctcgtcgatttccgaccaatctgggcgtataatgaatctaaactttaatttcttgtaatcattcgaaataatttttagtttgcatccgtagttatcccctttatgtaactgtaaatttctcaacgcgatatctccattaataatgatgtcgaattcgtgctgtatacccatactgaatggatgaacgaataccgacggcgttaatagtaatttactttttcatctttacatattgggtactagttttactatcataagtttataaattccacaagctactatggaataagccaaccatcttagtataacacacatgtcttaaagtttattaattaattacatgttgttttatatatcgctacgaatttaaacagagaaatcagtttaggaaaaaaaattatctatctacatcatcacgtctctgtattctacgatagagtgctactttaagatgagacatatccgtgtcatcaaaaatatactccattaaaatgattattccggcagcgaacttgatattggatatatcacaacctttgttaatatctacgacaatagacagcagtcccatggttccataaacagtgagtttatctttctttgaagagatattttgtagagatcttataaaactgtcgaatgacatcgcatttatatctttagctaaatcgtatatgttaccatcgtaatatctaaccgcgtctatcttaaacgtttccatcgctttaaagacgtttccgatagatggtctcatttcatcagtcatactgagccaacaaatataatcgtgtataacatctttgatagaatcagactctaaagaaaacgaatcggctttattatacgcattcatgataaacttaatgaaaaatgtttttcgttgtttaagttggatgaatagtatgtcttaataattgttattatttcattaattaatatttagtaacgagtacactctataaaaacgagaatgacataactaatcataactagttatcaaagtgtctaggacgcgtaattttcatatggtatagatcctgtaagcattgtctgtattctggagctattttctctatcgcattagtgagttcagaatatgttataaatttaaatcgaataacgaacataactttagtaaagtcgtctatattaactcttttattttctagccatcgtaataccatgtttaagatagtatattctctagttactacgatctcatcgttgtctagaatatcacatactgaatctacatccaattttagaaattggtctgtgttacatatctcttctatattattgttgatgtattgtcgtagaaaactattacgtagaccattttctttataaaacgaatatatagtactccaattatctttaccgatatatttgcacacataatccattctctcaatcactacatctttaagattttcgttgttaagatatttggctaaactatataattctattagatcatcaacagaatcagtatatatttttctagatccaaagacgaactctttggcgtcctctataatattcccagaaaagatattttcgtgttttagtttatcgagatctgatctgttcatatacgccatgattgtacggtacgttatgataaccgcataaaataaaaatccattttcatttttaaccaatactattcataattgagattgatgtaatactttgttactttgaacgtaaagacagtacacggatccgtatctccaacaagcacgtagtaatcaaatttggtgttgttaaacttcgcaatatttatcaatttagatagaaacttatactcatcatctgttttaggaatccatgtattattaccactttccaacttatcattatcccaggctatgtttcgtccatcatcgttgcgcagagtgaataattcttttgtattcggtagttcaaatatataatccatgcatagatcggtaaagctattgtagatgtgatttttcctaaatctaatataaaactcgtttactagcaaacactttcctgatttatcgaccaagacacatatggtttctaaatctatcaagtggtggggatccatagttatgacgcagtaacatagattattaccttcttaactgtcgctaatatctatatatttattgttatcgtattggattctgcatatagatggcttgtatgtcaaagatatagaacacataaccaatttatagtcgcgctttacattctcgaatctaaagttaagagatttagaaaacattatatcctcggatgatgttatcactgtttctggagtaggatatattaaagtctttacagatttcgtccgattcaaataaatcactaaataatatcccacattatcatctgttagagtagtatcattaaatctattatattttatgaaagatatatcactgctcacctctatatttcgtacatttttaaactgtttgtataatatctctctgatacaatcagatatatctattgtgtcggtagacgataccgttacatttgaattaatggtgttccattttacaacttttaacaagttgaccaattcatttctaatagtatcaaacgctccatgattaaatattttaatagtatccattttatatcactacggacacaaagtagctgacataaaccattgtataatttttatgttttatgtttattagcgtacacattttggaagttccggcttccatgtatttcctggagagcaagtagatgatgaggaaccagataggttatatccgtacttgcacttaaagtttacattgtcgttgtatgagtatgatcttttaaacccgctagacaagtatccgtttgatattgtaggatgtggacatttaacaatctgacacgtgggtggatcggaccattctcctcctgaacacaggacaccagagttaccaatcaacgaatatccactattgcaactataagttacaacgcttccatcggtataaaaatcctcgtatccgttatgtcttccgttggatatagatggaggggattggcatttaacagattcacaaataggtgcctcgggattccataccatagatccagtagatcctaattcacaatacgatttagattcaccgatcaaatgatatccgctattacaagagtacgttatactagagccaaagtctactccgccaatatcaagttggccattatcgatatctcgaggcgatgggcatctccgtttaatacattgattaaagagtgtccatccagtacctgtacatttagcatatataggtcccattttttgctttctgtatccaggtagacatagatattctatagtgtctcctatgttgtaattagcattagcatcagtctccacactattcttaaatttcatattaatgggtcgtgacggaatagtacagcatgatagaacgcatcctattcccaacaatgtcaggaacgtcacgctctccaccttcatatttatttatccgtaaaaatgttatcctggacatcgtacaaataataaaaagcccatatatgttcgctattgtagaaattgtttttcacagttgctcaaaaacgatggcagtgacttatgagttacgttacactttggagtctcatctttagtaaacatatcataatattcgatattacgagttgacatatcgaacaaattccaagtatttgattttggataatattcgtattttgcatctgctataattaagatataatcaccgcaagaacacacgaacatctttcctacatggttaaagtacatgtacaattctatccatttgtcttccttaactatatatttgtatagataattacgagtctcgtgagtaattccagtaattacatagatgtcgccgtcgtactctacagcataaactatactatgatgtctaggcatgggagacttttttatccaacgatttttagtgaaacattccacatcgtttaatactacatatttttcatacgtggtataaactccacccattacatatatatcatcgtttacgaataccgacgcgcctgaatatctaggagtaattaagtttggaagtcttatccatttcgaagtgccgtgtttcaaatattctgccacacccgttgaaatagaaaattctaatcctcctattacatataactttccattgttaacacaagtactaacttctgattttaacgacgacatattagtaaccgttttccattttttcgtttcaagatctacccgcgatacggaataaacatgtctattgttaatcatgccgccaataatgtatagacaattatgtaaaacatttgcattatagaattgtctatctgtattaccgactatcgtccaatattctgttctaggagagtaatgggttattgtggatatataatcagagtttttaatgactactatattatgttttataccatttcgtgtcactggctttgtagatttggatatagttaatcccaacaatgatatagcattgcgcatagtattagtcataaacttgggatgtaaaatgttgatgatatctacatcgtttggatttttatgtatccactttaataatatcatagctgtaacatcctcatgatttacgttaacgtcttcgtgggataagatagttgtcagttcatcctttgataattttccaaattctggatcggatgtcaccgcagtaatattgttgattatttctgacatcgacgcattatatagttttttaattccatatcttttagaaaagttaaacatccttatacaatttgtggaattaatattatgaatcatagtttttacacatagatctactacaggcggaacatcaattattatggcagcaactagtatcatttctacattgtttatggtgatgtttatcttcttccagcgcatatagtctaatagcgattcaaacgcgtgatagtttataccattcaatataatcgcttcatcctttagatggtgatcctgaatgcgtttaaaaaaattatacggagatgccgtaataatttccttattcacttgtataatttccccattgatagaaaatatcacgctttccattcttgaagtactataagtaattatagtataatgtaaaggtttatatattcaatattttttataaaaaaatcatttcgacattaattcctttttaaatttccgtctatcatctatagaaacatattctatgaatttataaaatgcttttacgtgtcctatcgtaggcgatagaaccgctaaaaagcctattgaatttctacaaaagaatctattatatggtatagggagagtataaaacattaaatgcccgtacttattaaagtattcagtagccaatcctaactctttcgaatacttattaatggctcttgttctgtacgaatctatttttttgaacaacggacctagtggtatatcttgttctatgtatctaaaataatgtctgactagatccgttagtttaatatcctcagtcatcttgtctagaatggcaaatctaactgcgggtttaggctttagtttagtttttatatctacatctatgtctttatctaacaccaaaaatataatagctaatattttattacaatcatccggatattcttctacgatctcactaactaatgtttctttggttatactagtatagtcactatcggacaaataaagaaaatcagatgatcgatgaataatacatttaaattcatcatctgtaagatttttgagatgtctcattaaaatattattagggtcagtactcattatcattaggcagctattacttattttattatttttcaccatatagatcaatcattagatcatcaaaatatgtttcaatcatcctaaagagtatggtgaatgactcttcccatctaatttctgaacgttcaccaatgtctctagccactttggcactaatagcgatcattcgcttagcgtcttctatattattaactggttgattcaatctatctagcaatggaccgtcggacagcgtcattctcatgttcttaatcaatgtacatacatcgccgtcatctaccaattcatccaacaacataagctttttaaaatcatcattataataggtttgatcgttgtcatttctccaaagaatatatctaataagtagagtcctcatgcttagtaatttaactattttagttaacaactattttttatgttaaatcaattagtacaccgctatgtttaatacttattcatattttagtttttaggattgagaatcaatacaaaaattaatgcatcattaattttagaaatacttagtttccacgtagttaatgaaacatttgaactcatcgtacaagacgttctcgtacaggacgtaactataaaccggtttatatttgttcaagatagatacaaatccgataactttttttacgaattctacgggatccactttaaaagtgtcataccgggttctttttatttttttaaacagatcaatggtgtgatgttgattaggtcttttacgaatttgatatagaatagcgtttacatattctccataatggtcaatcgccatttgttcgtatgtcataaattctttaattatatgacactgtgtattgtttagttcatccttgttcattgttaggaatctatccaaaatggcaattatactagaactataggtgcgttgtatacacatattgatgtgtctgtttatacaatccatgatatttggatccatgctactaccttcgggtaaaattgtagcatcatataccatttctagtactttaggttcattattatccattgcagaggacgtcatgatcgcatcctaaaaaaatatattatttttatgttattttgttaaaaataatcatcgaatacttcgtaagatactccttcatgaacataatcagttacaaaacgtttatatgaagtaaagtatctacgatttttacaaaagtccggatgcataagtacaaagtacgcgataaacggaataataatagatttatctagtctatctttttctatagctttcatagttagatacatggtctcagaagtaggattatgtaacatcagcttcgataaaatgactgggttatttagtcttacacattcgctcatacatgtatgaccgttaactacagagtctacactaaaatgattgaacaatagatagtctaccattgtttcgtattcagatagtacagcgtagtacatggcatcttcacaaattatatcattgtctaatagatatttgacgcatcttatggatcccacttcaacagccatcttaaaatcggtaaaatcatattgctttcctttatcattaataatttctaaaacatcatctctatcataaaagatacaaatattaactgtttgatccgtaataacattgctagtcgatagcaatttgttaataagatgcgctgggctcaatgtcttaataagaagtgtaagaggactatctccgaatttgttttgtttattaacatccgttgatggaagtaaaagatctataatgtctacattcttgactgttttagagcatacaatatggagaggtgtatttccatcatgatctggttttgagggactaattcctagtttcatcatccatgagattgtagaagcttttggattgtctgacataagatgtctatgaatatgatttttgccaaatttatccactatcctggcttcgaatccgatggacattatttttttaaacactctttctgaaggatctgtacacgccaacaacggaccacatccttcttcatcaaccgagttgttaatcttggctccatactgtaccaataaatttattctctctatgacttcatcatctgttcccgagagataatatagaggcgttttatgctgtttatcacacgcgtttggatctgcgccgtgcgtcagcagcatcgcgactattctattattattaattttagaagctatatgcaatggataatttccatcatcatccgtctcatttggagagtatcctctatgaagaagttcttcgacaaatcgttcatctagtcctttaattccacaatacgcatgtagaatgtgataattatttccagaaggttcgatagcttgtagcatattcctaaatacatctaaatttttactattatatttggcataaagagatagataatactcggccgacataatgttgtccattgtagtataaaaattaatatttctatttctatttctgtatatttgcaacaatttactctctataacaaatatcataacttagttcttttatgtcaagaaggcactggtttagttcatctataaatgtcacgccataactaccacgcatgctatactcagaattatgataaagatatttatccttggggtgtaggtaatggggattaatctttgttggatcagtctctaagttaacacatgtcacacatgatccatttatagttatatcacacgatgatgatttatgaattgattccggaagatcgctatcgtattttgtggttccacaattcatttccatacatgttattgtcacactaatattatgatgaactttatctagccgctgagtggtaaacaacagaacagatagtttattatctttaccaacaccctcagccgctgccacaaatctctgatccgtatccatgatggtcatgtttatttctagtccgtatccagtcaacactatgttagcatttctgtcgatatagctttcactcatatgacactcaccaataatagtagaattaatgtcgtaatttacaccaatagtgagttcggcggcaaagtaccaataccggtaatcttgtcgaggaggacatatagtattcttgtattctaccgaatacccgagagatgcgatacaaaagagcaagactaatttgtaaaccatcttactcaaaatatgtaacaatagtacgatgcaatgagtaagacaataggaaatctatcttatatacacataattattctatcaattttaccaattagttagtgtaatgttaacaaaaatgtgggagaatctaattagtttttctttacacaattgacgtacatgagtctgagttccttgtttttgctaattatttcatccaatttattattcttgactatatcgagatcttttgtataggagtcagacttgtattcaacatgcttttctataatcattttagctatttcggcatcatccaatagtacattttccagattagcagaatagatattaatgtcgtatttgaacagagcctgtaacatctcaatgtctttattatctatagccaatttaatgtccggaatgaagagaagggaattattggtgtttgtcgacgtcatatagtcgagcaagagaatcatcatatccacgtgtccattttttatagtggtgtgaatacaactaaggagaatagccagatcaaaagtagatggtatttctgaaagaaagtatgatacaatacttacatcattaagcatgacggcatgataaaatgaagttttccatccagttttcccatagaacatcagtctccaatttttcttaacaaacagttttaccgtttgcatgttaccactatcaaccgcataatacaatgcagtgtttcccttgtcatcaaattgtgaatcatccagtccactgaatagcaaaatctttactattttggtatcttccaatgtggctgcctgatgtaatggaaattcattctctagaagatttttcaatgctccagcgttcaacaacgtacatactagacgcacgttattatcagctattgcataatacaaggcactatgtccatggacatccgccttaaatgtatctttactagagagaaagcttttcagctgcttagacttccaagtattaattcgtgacagatccatgtctgaaacgagacgctaattagtgtatattttttcattttttataattttgtcatattgcaccagaattaataatatctctaatagatctgattagtagatacatggctatcgcaaaacaacatatacacatttaataaaaataatatttattaagaaaattcagatttcacgtacccatcaatataaataaaataatgattccttacaccgtacccatattaaggagattccaccttacccataaacaatataaatccagtaatatcatgtctaatgatgaacacaaatggtgtattaaattccagtttttcaggagatgatctcgccgtagctaccataatagtagatgcctctgctacagttccttgttcgtcgacatctatctttgcattctgaaacattttataaatatataatgggtccctagtcatatgtttaaacgacgcattatctggattaaacatactaggagccatcatttcggctatcgacttaatatccctcttattttcgatagaaaatttagggagtttaagattgtacactttattccctaattgaaacgaccaatagtctaattttgcagccgtaatagaatctgtgaaatgggtcatattatcacctattgccaggtacatactaatattagcatccttatacggaaggcgtaccatgtcatattctttgtcatcgattgtgattgtatttccttgcaatttagtaactacgttcatcatgggaaccgttttcgtaccgtacttattagtaaaactagcattgcgtgttttagtgatatcaaacggatattgccatgtacctttaaaatatatagtattaatgattgcccatagagtattattgtcgagcatattagaatctactacattagacataccggatctacgttctactatagaattaattttattaaccgcatctcgtctaaagtttaatctatataggccgaatctatgatattgttgataatacgacggtttaatacacacagtattatctacgaaactttgataagttagatcagtgtacgtatatttagatgttttcagcttagctaatcctgatattaattctgtaaatgctggacccagatctctttttctcaaatccatagtcttcaataattctattctagtattacctgatgcaggcaatagcgacataaacatagaaaacgaatagccaaacggcgagaagacaatattatcatcttgaatatttttatacgctactataccggcattggtaaatccttgcagacgataggtagacgctgaacacgttaacgatagtatcaataacgcaatcatgattttatggtattaataattaaccttatttttatgttcggtataaaaaaattattgatgtctacacatccttttgtaattgacatctatatatccttttgtataatcaactctaatcactttaacttttacagttttccctaccagtttatccctatattcaacatatctatccatatgcatcttaacactctctgccaagatagcttcagagtgaggatagtcaaaaagataaatatatagagcataatccttctcgtatactctgccctttattacatcgcccgcattgggcaacgaataacaaaatgcaagcatcttgttaacgggctcgtaaattgggataaaaattatgtttttatatctattttattcaagagaatattcaggaatttctttttccggttgtatctcgtcgcagtatatatcatttgtacattgtttcatattttttaatagtttacaccttttagtaggactagtatcgtacaattcatagctgtattttgaattccaatcacgcataaaaatatcttccaattgttgacgaagacctaatccatcatccggtgtaatattaatagatgctccacatgtatccgtaaagtaatttcctgtccaatttgaggtacctatataggccgttttatcggttaccatatatttggcatggtttaccctagaatacggaatgggaggatcagcatctggtacaataaatagctttacttctatatctatgtttttagattttagcatagcgatagatcttaaaaagtttctcatgataaacgaagatcgttgccagcaactaatcaatagcttaacggatacttgtctgtctatagcggatcttcttaattcatcttctatataaggccaaaacaaaattttacccgccttcgaataaataatagggataaagttcataacagatacataaacgaatttactcgcatttctaatacatgacaataaagcggttaaatcattggttctttccatagtacatagttgttgcggcgcagaagcaataaatacagagtgtggaacaccacttacgttaatactaagaggatgatctgtattataatacgacggataaaagtttttccaattatatggtagattgttaactccaagataccagtatacctcaaaaatttgagtgagatccgctgccaagttcctattattgaagatcgcaatacccaattctttgacctgagttagtgatctccaatccatgttagcgcttcctaaataaatatgtgtattatcagatatccaaaattttgtatgaagaactcctcctaggatatttgtaatatctatgtatcgtacttcaactccggccatttgtagtctttcaacatcctttaatggtttgttagatttattgacggctactctaactcttactcctcttttgggtaattgtacaatctcgtttaatattatcgtgccgaaattcgtacccacttcatccgataaactccaataaaaagatgatatatctagtgtttttgtggtattggatagaatttccctccacatgttaaatgtagacaaatatactttatcaaattgcatacctataggaatagtctctgtaatcactgcgattgtattatccggattcattttatttgttaaaaaataatcctatatcacttcactctattaaaaatccaagtttctatttctttcatgactgattttttaacttcatccgtttccttatgaagatgatgtttggcaccttcataaatttttatttctctattacaatttgcatgttgcatgaaataatatgcacctaaaacatcgctaatctcattgtttgttccctggagtatgagagtcgggggggtgttaatcttggaaattatttttctaaccttgttggtagccttcaagacctgactagcaaatccagccttaattttttcatgattgattaatgggtcgtattggtatttataaactttatccatatctctagatactgattctggacatagctttccgactggcgcatttggtgtgatggttcccataagtttggcagctagcagattcagttttgaaacagcatctgcattaactagaggagacattagaatcattgctgtaaacaagtttggattatcgtaagaggctagtatagaaattgttgctcccatggaatgacccaataagtagatttaatagttaccacgtgctgtaccaaagtcatcaatcatcattttttcaccattacttcttccatgtccaatatgatcatgtgagaatactaaaattcctaacgatgatatgttttcagctagttcgtcataacgtccagaatgtttaccagctccatgacttatgaatactaatgccttaggatatgtaataggtttccaatatttacaatatatgtaatcattgtccagattgaacatacagtttgcactcatgattcacgttatataactatcaatattaacagttcgtttgatgatcatattatttttatgttttattgataattgtaaaaacatacaattaaatcaatatagaggaaggagacggatactgtcttttgtgagatagtcatggcgactaaatcagattatgaggatgctgttttttactttgtggatgatgataaaatatgtagtcgcgactccatcatcgatctaatagatgaatatatcacgtggagaaatcatgttatagtgtttaacaaagatattaccagttgtggaagactgtacaaggaattgatgaagttcgatgatgccgctatacagtactatggtattgataaaattaatgagattgtcgaagctatgagcgaaggagaccactacatcaattttacaaaagtccatgatcaggaaagtttattcgctaccataggaatatgtgctaaaatcactgaacattggggatacaaaaagatttcagaatctagattccaatcattgggaaacattacagatctgatgaccgacgataatataaacatcttgatactttttctagaaaaaaaattgaattgatgatataggggtcttcataacgcataattattacgttagcattctatatccgtgttaaaaaaaattatcctatcatgtatttgagagttttatatgtagcaaacatgatagctgtgatgccaataagctttagatattcacgcgtgctagtgttagggatggtattatctggtggtgaaatgtccgttatataatctacaaaacaatcatcgcatatagtatgcgatagtagagtaaacatttttatcgtttctactgggttcatacatcgtctacccaattcggttatgaatgaaattgtcgccaatcttacacccaaacccttgttatccattagcatagtattaacttcgttatttatgtcataaactgtaaatgattctgtagatgccatatcatacatgatattcatgtccctattataatcattactaactttatcacaatatatgttgataatatctatatatgatctagtctttgtgggcaactgtctatacaagtcgtctaaacgttgtttactcatatagtatcgaacagccatcattacatggtcccgttccgttgatagataatcgagtatgttagtggacttgtcaaatctatataccatattttctggaagtggatatacatagtcgtgatcaacattattgctagcctcatcttctatatcctgtactataccattatctatatcatctacataatctacgatattattatacataaacatcgacaacatactattgtcaattatctaagtcctgttgatccaaacccttgatctcctctatctgtactatctagagattgtacttcttccagttctggataatatatacgttgatagattagctgggctattctatcccccgtatttacattaaacgtacattttccattattaataagaataactcctatgtttcccctataatcttcgtctattacaccgcctcctatatcaatgccttttagggacagaccagacctaggagctattctaccatagcagaacttaggcatggacatactaatatctgtcttaattaactgtcgttctccaggagggatagtataatcgtaagcgctatataaatcatatccggcggcgtaaggtgattgcctagtaggagatttagctctgttagtttccttaacaaatctaactggtgagttaatattcatgttgaacataaaactaatattttatttcaaaattatttaccatcccatatattccatgaataagtgtgatgattgtacacttctatagtatctatatacgattcacgataaaatcctcctatcaatagcagtttattatccactatgatcaattctggattatccctcggataaataggatcatctatcagagtccatgtattgctggattcacaataaaattccgcatttctaccaaccaagaataaccttctaccgaacactaacgcgcatgatttataatgaggataataagtggatggtccaaactgccactgatcatgattgggtagcaaatattctgtagttgtatcagtttcagaatgtcctcccattacgtatataacattgtttatagatgccactgctggattacatctaggtttcagaagactcggcatattaacccaagcagcatccccgtggaaccaacgctcaacagatgtgggatttggtagacctcctactacgtataatttattgttagcgggtatcccgctagcatacagtctggggctattcatcggaggaattggaatccaattgtttgatatataatttacagctatagcattgttatgtatttcattgttcatccatccaccgatgagatatactacttctccaacatgagtacttgtacacatatggaatatatctataatttgatccatgttcataggatactctatgaatggatacttgtatgatttgcgtggttgtttatcacaatgaaatattttggtacagtctagtatccattttacattatttatacctctgggagaaagataatttgacctgattacatttttgataaggagtagcagatttcctaatttatttcttcgctttatataccacttaatgacaaaatcaactacataatcctcatctggaacatttagttcatcgctttctagaataagtttcatagatagataatcaaaattgtctatgatgtcatcttccagttccaaaaagtgtttggcaataaagtttttagtatgacataagagattggatagtccgtattctatacccatcatgtaacactcgacacaatattcctttctaaaatctcgtaagataaagtttatacaagtgtagatgataaattctacagaggttaatatagaagcacgtaataaattgacgacgttatgactatctatatatacctttccagtatatgagtaaataactatagaagttaaactgtgaatgtcaaggtctagacaaacccttgtaactggatctttatttttcgtgtatttttgacgtaaatgtgtgcgaaagtaaggagataactttttcaatatcgtagaattgactattatattgccacctatagcatcaataattgttttgaatttcttagtcatagacaatgctaatatattcttacagtacacagtattaacaaatatcggcatttatgtttctttaaaagtcaacatctagagaaaaatgattatctttttgagacataactcccattttttggtattcacccacacgtttttcgaaaaaattagtttttccttccaatgatatattttccatgaaatcaaacggattggtaacattataaatttttttaaatcccaattcagaaatcaatctatccgcgacgaattctatatatgttttcatcatttcacaattcattcctataagtttaactggaagagccgcagtaagaaattcttgttcaatggatactgcatctgttataatagatctaacggtttcttcactcggtggatacaataaatgtttaaacatcaaacatgcgaagtcgcagtgtagaccctcgtctctactaattagttcgttggaaaacgtgagtccgggcattaggccacgctttttaagccaaaatatggaagcgaatgatccggaaaagaagattccttctactgcagcaaaggcaataagtctctctccataaccggcgctgtcatgtatccacttttgagcccaatcggccttcttttttacacaaggcattgtttctatggcattaaagagatagtttttttcattactatctttaacataagtatcgatcaaaagactatacatttccgaatgaatgttttcaatggccatctgaaatccgtagaaacatctagcctcggtaatctgtacttctgtacaaaatcgttccgccaaattttcattcactattccgtcactggctgcaaaaaacgccaatacatgttttataaaatatttttcgtctggtgttagtttattccaatcattgatatctttagatatatctacttcttccactgtccaaaatgatgcctctgcctttttatacatgttccagatgtcatgatattggattgggaaaataacaaatctatttggatttggtgcaaggatgggttccataactaaattaacaatatcaataaattttttttcagttatctatatgcctgtacttggattttttgtacatcgatatcgccgcaatcactacaataattacaagtattattgatagcattgttattagtactatcataattaaattatcgacattcatgggtgctgaataatcgttattatcatcattatcattttgtaattgtgacatcatactaaataaatcgtttgcgagattgttgtgggaagcgggcatggaggatgcattatcattattatttaacgccttccatttggattcacaaatatggcgcgcgttcaacattttatggaaactataattttgtgaaaacagataacaagaaaactcgtcatcgttcaaatttttaacgatagtaaaccgattaaacgtcgagctaatttctaacgctagcgactctgttggatatgggtttccagatatatatcttttcagttcccctacgtatctataatcatctgtaggaaatggaagatatttccatttatctactgttcctaatatcatatgtggtggtgtagtagaaccattaagcgcgaaagatgttatttcgcatcgtattttaacttcgcaataatttctggttagataacgcactctaccagtcaagtcaatgatattagcctttacagatatattcatagtagtcgtaacgatgactccatcttttagatgcgatactcctttgtatgtaccagaatcttcgtacctcaaactcgatatatttaaacaagttaatgagatattaacgcgttttatgaatgatgatatataaccagaagttttatcctcggtggctagcgctataaccttatcattataataccaactagtgtgattaatatgtgacacgtcagtgtgggtacaaatatgtacattatcgtctacgtcgtattcgatacatccgcatacagccaacaaatataaaatgacaaatactctaacgccgttcgtacccatcttgatgcggtttaataaatgttttgatttcaatttattgtaaaaaaagattcggttttatactgttcgatattctcattgcttatattctcatctatcatctccacacagtcaaatccgtggttagcatgcacctcatcaaccggtaaaagactatcggactcttctatcattataactctagaatatttaatttggtcattattaatcaagtcaattatcttatttttaacaaacgtgagtattttactcattttttataaaaacttttagaaatatacagactctatcgtgtgtctatatcttctttttatatccaatgtatttatgtctgatttttcttcatttatcatatataatggtccaaattctacacgtgcttcggattcatccagatcattaaggttcttataattgtaacatccttctcttccctcttctacatcttccttcttattcttattcttagcgtcacagaatctaccacagcaggatcccatgacgagcgtcatattaaactaatccattttcaattataatatatgattagtaatgaccattaaaataaaaaatattcttcataaccggcaagaaagtgaaaagttcacattgaaactatgtcagtagtatacatcatgaaatgatgatatatatatactctattttggtggaggattatatgatataattcgtggataatcattcttaagacacatttcttcattcgtaaatcttttcacgttaaatgagtgtccatattttgcaatttcttcatatgatggcggtgtacgtggacgaggctgctcctgttcttgttgtggtcgccgactgtcgtgtttgcgtttatccctccattatcgcgattgcgtagatggagtactattatataccttgtaattaaatttttttattaattaaacgtataaaaacgttccgtatctgtatttaagagccagatttcgtctaatagaacaaatagctacagtaaaaataactagaataattgctacacccactagaaaccacggatcgtaatacggcaatcggttttcgataataggtggaacgtatattttatttaaggacttaacaattgtctgtaaaccacaatttgcttccgcggatcctgtattaactatctgtaaaagcatatgttggccgggcggagccgaacattctccgatatccaatttctgtatatctataatattattaacctccgcatacgcattacagttcttttctagcttggataccgcactaggtacatcgtctagatctattcctatttcctcagcgatagctcttctatccttttccggaagcaatgaaatcacttcaataaatgattcaaccatgagtgtgaaactaagtcgagaattactcatgcatttgttagttattcggagcgcgcaatttttaaactgtcctataacctctcctatatgaatagcacaagtgacattagtagggatagaatgttgagctaatttttgtaaataactatctataaaaagattatacaaagttttaaactctttagtttccgccatttatccagtctgagaaaatgtctctcataataaatttttccaagaaactaattgggtgaagaatggaaacctttaatctatatttatcacagtctgttttggtacacatgatgaattcttctaatgccgtactaaattcgatatctttttcgatttctggatatgtttttaataaagtatgaacaaagaaatggaaatcgtaataccagttatgtttaactttgaaattgttttttattttcttgttaatgattccagccacttgggaaaagtcaaagtcgtttaatgccgatttaatacgttcattaaaaacaaactttttatcctttagatgaattattattggttcattggaatcaaaaagtaagatattatcgggtttaagatctgcgtgtaaaaagttgtcgcagcatggtagttcgtagattttaatgtataacagagccatctgtaaaaagataaactttatgtattgtaccaaagatttaaatcctaatttgatagctaactcggtatctactttatctgccgaatacagtgctaggggaaaaattataatgtttcctctttcgtattcgtagttagttctcttttcatgttcgaaaaagtgaaacatgcggttaaaatagtttataacattaatattactgttaataactgccgggtaaaagtgggatagtaatttcacgaatttgatactgtcctttctctcgttaaacgcctttagaaaaactttagaagaatatctcaatgatagttcctgaccatccatagtttgtatcaataatagcaacatatgaagaacacgtttatacagagtatgtaaaaatgttaatttatagtttaatcccatggcccacgcacacacgattaattttttttcatctccctttagattgttgtatagaaatttgggtactgtgaactccgccgtagtttccatgggactatataattttgtggcctcgaatacaaattttactacatagttatctatcttaaaaactataccatatcctcctgtagatatgtgataaaaatcgtcgtttataggataaaatcgtttatccttttgttggaaaaaggatgaattaatgtaatcattctcttctatctttagtagtgtttccttattaaaattcttaaaataatttaacaatctaactgacggagcccaattttggtgtaaatctaattgggacattatattgttaaaatacaaacagtctcctaatataacagtatctgataatctatggggagacatccattgatattcaggggatgaatcattggcaacacccatttattgtacaaaaagccccaatttacaaacgaaagtccaggtttgatagagacaaactattaactattttgtctctgtttttaacacctccacagtttttaatttctttagtaatgaaattattcacaatatcagtatcttctttatctaccagagattttactaacttgataaccttggctgtctcattcaatagggtagtaatatttgtatgtgtgatattgatatctttttgaattgtttcttttagaagtgattctttgatggtgccagcatacgaattacaataatgcagaaactcggttaacatgcaggaattatagtaagccaattccaattgttgcctgtgttgtattagagtgtcaatatgagcaatggtgtccttgcgtttctctgatagaatgcgagcagcgattttggcgttatcatttgacgatatttctggaatgacgaatcctgtttctactaactttttggtaggacaaagtgaaacaatcaagaagatagcttctcctcctatttgtggaagaaattgaactcctctagatgatctactgacgatagtatctccttgacagatattggaccgaattacagaagtacctggaatgtaaagccctgaaaccccctcattttttaagcagattgttgccgtaaatcctgcactgtgaccaagatagagagctcctttggtgaatccatctctatgtttcagtttaaccaagaaacagtcagctggtctaaaatttccatctctatctaatacagcatctaacttgatgtcaggaactatgaccggtttaatgttatatgtaacattgagtaaatccttaagttcataatcatcactgtcatcagttatgtacgatccaaacaatgtttctactggcatagtggatacgaagatgctatccatcagaatgtttccctgattagtattttctatatagctattcttctttaaacgattttccaaatcagtaactatgttcatttttttaggagtaggacgcctagccagtatggaagaggattttctagatcctctcttcaacatctttgatctcaatggaatgcaaaaccccatagtgaaacaaccaacgataaaaataatattgtttttcactttttataattttaccatctgactcatggattcattaatatctttataagagctactaacgtataattctttataactgaactgagatatatacaccggatctatggtttccataattgagtaaatgaatgctcggcaataactaatggcaaatgtataaaacaacgaaattatactagagttgttaaagttaatattttctatgagctgttccaataaattatttgttgtgactgcgttcaagtcataaatcatcttgatactatccagtaaacagtctttaagttctggaatattatcatcccattgtaaagcccctaattcgactatcgaatatcctgctctgatagcagtttcaatatcgacggacgtcaatactgtaataaaggtggtagtattgtcatcatcgtgataaactacgggaatatggtcgttagtaggtacggtgactttacacaacgcgatatataactttccttttgtaccatttttaacgtagttgggacgtcctgcagggtattgttttgaagaaatgatatcgagaacagatttgatacgatatttgttggattcctgattattcactataatataatctagacagatagatgattcgataaatagagaaggtatatcgttggtaggataatacatccccattccagtattctcggatactctattgatgacactagttaagaacatgtcttctattctagaaaacgaaaacatcctacatggactcattaaaacttctaacgctcctgattgtgtctcgaatgcctcgtacaaggatttcaaggatgccatagattctttgaccaacgatttagaattgcgtttagcatctgatttttttattaaatcgaatggtcggctctctggtttgctaccccaatgataacaatagtcttgtaaagataaaccgcaagaaaatttatacgcatccatccaaataaccctagcaccatcggatgatattaatgtattattatagattttccatccacaattattgggccagtatactgttagcaacggtatatcgaatagattactcatgtaacctactagaatgatagttcgtgtactagtcataatatctttaatccaatctaagaaatttaaaattagattttttacactgttaaagttaacaaaggtattacccggatacgtggatatcatatatggcattggtccattatcagtaatagctccataaactgatacggcgatggtttttatatgtgtttgatctaacgaggaagaaattcgcgcccacaattcatctctagatatgtatttaatatcaaacggtaacacatcaatttcgggacgcgtatatgtttctaaatttttaatccaaatataatgatgacctatatgccctattatcatactgtcaactatagtacacctagagaacttacgatacatctgtttcctataatcgttaaattttacaaatctataacatgctaaaccttttgacgacaaccattcattaatttctgatatggaatctgtattctcgataccgtattgttctaaagccagtgctatatctccctgttcgtgggaacgctttcgtataatatcgatcaacggataatctgaagtttttggagaataatatgactcatgatctatttcgtccataaacaatctagacataggaattggaggcgatgatcttaattttgtgcaatgagtcgtcaatcctataacttctaatattgtaatattcatcatcgacataacactatctatgttatcatcgtatattagtataccacggccttcttcatttcgtgccaaaataatatacagtcttaaataattacgcaatatctcaatagtttcataattgttagctgttttcatcaaggtttgtatcctgtttaacatgatggcgttctataacgtctctattttctatttttaattttttaaatttttaacgatttactgtggctagatacccaatctctctcaaatatttttttagcctcgcttacaagctgtttatctatactattaaaactgacgaatccgtgattttggtaatgggttccgtcgaaatttgccgaagtgatatgaacatattcgtcgtcgactatcaacaattttgtattattctgaatagtgaaaaccttcacagatagatcattttgaacacacaacgcgtctagacttctggcggttgccatagaatatacgtcgttcttatcccaattaccaactagaagtctgatcttaactcctctattaatggctgcttctataatggagttgtaaatgtcaggccaatagtagctattaccgtcgacacgtgtagtgggaactatggccaaatgttcaatatctatactagtcttagccgacttgagtttatcaataactacatcagtgtctagatctctagaatatcccaataggtgttctggagaatcagtaaagaacactccacctataggattcttaatatgatacgcagtgctaactggcagacaacaagccgcagagcataaattcaaccatgaattttttgcgctattaaaggctttaaaagtatcaaatcttctacgaagatctgtggccagcgggggataatcagaatatacacctaacgttttaatcgtatgtatagatcctccagtaaatgacgcgtttcctacataacatctttcatcatctgacacccaaaaacaaccgagtagtagtcccacattattttttttatctatattaacggttataaaatttatatccgggcagtgactttgtagctctcccagatttcttttccctcgttcatctagcaaaactattattttaatccctttttcagatgcctcttttagtttatcaaaaataagcgcgcccctagtcgtactcagaggattacaacaaaaagatgctatgtatatatatttcttagctagagtgataatttcgttaaaacattcaaatgttgttaaatgatcggatctaaaatccatattttctggtagtgtttctaccagcctacattttgctcccgcaggtaccggtgcaaatggccacatttagttaacataaaaacttatacatcctgttctatcaacgattctagaatatcatcggctatatcgctaaaattttcatcaaagtcgacatcacaacctaactcagtcaatatattaagaagttccatgatgtcatcttcgtttatttctatatccgtatccattgtagattgttgaccgattatcgagtttaaatcattactaatactcaatccttcagaatacaatctgtgtttcattgtaaatttataggcggtgtatttaagttggtagattttcaattatgtatcaatatagcaacagtagttcttgctcctccttgattctagcatcctcttcattattttcttctacgtacataagcatgtccaatacgttagacaacacaccgacgatggcggccgccacagacacgaatatgactagaccgatgaccatttaaaaacccctctctagctttcacttaaactgtatcgattattcttttagaacatgtataatataaaaacattattctatttcgaatttaggcttccaaaaatttttcatccgtaaaccgataataatatatatagacttgttaatagtcggaataaatagattaatgcttaaactatcatcatctccacgattagagatacaatatttacattctttttgctgtttcgaaactttatcaatacacgttaatacaaacccaggaaggagatattgaaactgaggctgttgaaaatgaaacggtgaatacaataattcagataatgtaaaatcatgattccgtattctgatgatattagaactgctaatggatgtcgatggtatgtatctaggagtatctattttaacaaagcatcgatttgctaatatacaattatcattttgattaattgttattttattcatattcttaaaaggtttcatatttatcaattcttctacattaaaaatttccatttttaatttatgtagccccgcaatactcctcattacgtttcattttttgtctataatatccattttgttcatctcggtacatagattatccaattgagaagcgcatttagtagttttgtacattttaagtttattgacgaatcgtcgaaaactagttatagttaacattttattatttgataccctgatattaatacccctgccgttactattatttataactgatgtaacccacgtaacattagaattaattatcgatagtaatgcatcgacgcttccaaaattgtctattataaactcaccgataatttttttattgcatgttttcatattcattaggattatcaaatctttaatcttattacgattgtatgcgttgatattacaagacgtcattctaaaagacggaggatctccatcaaatgccagacaatcacgtacaaagtacatggaaataggttttgttctattgcgcatcatagattcatatagaacacccatagaaatactaatttgttttactctataaaatactaatgcatctatttcatcgttttgtataacgtctttccaagtgccaaattccaaatttttttcattgatagtaccaaattcttctatctctttaactacttgcatagataggtaattacagtgatgcctacatgccgttttttgaaactgaatagatgcgtctagaagcgatgctacactagtcacaatcaccactttcatatttagaatatatgtatgtaaaaatatagtagaatttcattttgtttttttctatgctataaatgaattctcattttgcatctgctcatactccgttttatatcaataccaaagaaggaagatatctggttctaaaagccgttaaagtatgcgatgttagaactgtagaatgcgaaggaagtaaagcttcctgcgtactcaaagtagataaaccctcatcgcccgcgtgtgagagaagaccttcgtccccgtccagatgcgagagaatgaataaccctggaaaacaagtcccgtttatgaggacggacatgctacaaaatatgttcgcggctaatcgcgataatgtagcttctagacttttgtcctaaaatactattatatccttttcgatattaataaatccgtgtcgtccaggttttttatctctttcagtatgtgaatagataggtattttatctctattcatcatcgaatttaagagatccgataaacattgtttgtattctccagatgtcagcatctgatacaacaatatatgtgcacataaacctctggcacttatttcatgtaccttccccttatcactaaggagaatagtatttgagaaatatgtatacatgatattatcatgaattagatatacagaatttgtaacactctcgaaatcacacgatgtgtcggcgttaagatctaatatatcactcgataacacattttcatctagatacactagacattttttaaagctaaaatagtctttagtagtgacagtaactatgcgattattttcatcgatgatacatttcatcggcatattattacgcttaccatcaaagactataccatgtgtatatctaacgtattctagcatggttgccatacgtgcattaaacttttcaggatctttggatagatcttccaatctatctatttgagaaaacatttttatcatgttcaatagttgaaacgtcggatccactatatagatattatctataaagattttaggaactacgttcatggtatcctggcgaatattaaaactatcaatgatatgattatcgttttcatcttttatcaccatatagtttctaagatatgggattttacttaatataatattatttcccgtgataaattttattagaaaggccaaatctataagaaaagtcctagaattagtctgaagaatatctatatcgccgtaccgtatatttggattaattagatatagagaatatgatccgtaacatatacaacttttattatggcgtctaagatattcttccatcaacttattaacatttttgactagggaagatacattatgacgtcccattacttttgccttgtctattactgcgacgttcatagaatttagcatatctcttgccaattcttccattgatgttacattataagaaattttagatgaaattacatttggagctttaatagtaagaactcctaatatgtccgtgtatgtggtcactaatacagattgtagttctataatcgtaaataatttacctatattatatgtttgagtctgtttagaaaagtagctaagtatacgatcttttatttctgatgcagatgtatcaacatcggaaaaaaatctttttttattcttttttactaaagatacaaatatgtctttgttaaaaacagttattttctgaatatttctagcttgtaattttaacatatgatattcgttcacactaggtactctgcctaaataggtttctataatctttaatgtaatattaggaagagtattctgatcaggattcctattcattttgaggatttaaaactctgattattgtctaatatggtctcaacacaaactttttcacagagcgatagagtttttgataactcgtttttcttaagaaatataaaactactgtttccagagctcgctctatcttttattttatctaattcgatacaaactcctgatactggttcagaaagtaattcattaattttcagtcctttatagaagatatttaatatagataatacaaaattttcagttcttgatatcgatctgattgatcctagaactagatatattaataacgtgctcattaggcagtttatggcagcttgataattagatatagtatattccagttcatatttattagataccgcattgcccagattttgatattctatgaattcctctgaaaataaatccaaaataactagacattctattttttgtggattagtgtactctcttccctctatcatgttcactactggtgtccacgatgataaatatctagagggaatataatatagtccataggatgccaatctagcaatgtcgaataactgtaatttgattcttcgttcttcattatgaattgattcttgaggtataaacctaacacaaattatattattagacttttcgtatgtaatgtctttcatgttataagtttttaatcctggaatagaatctattttaatgaggcttttaaacgcagagttctccaacgagtcaaagcataatactctgttgtttttcttatatacgatgttacgattttcttctttgaatggaataggtttttgaattagtttataattacaacataatagataaggaagtgtgcaaatagtacgcggaaaaaacataatagctcccctgttttcatccatggttttaagtaaatgatcactggcttctttagtcaatggatattcgaacattaaccgtttcatcatcattggacagaatccatatttcttaatgtaaagagtgatcaaatcattgtgtttattgtaccatcttgttgtaaatgtgtattcggttatcggatctgctcctttttctattaaagtatcgatgtcgatctcgtctaagaattcaactatatcgacatatttcatttgtatacacataaccattactaacgtagaatgtataggaagagatgtaacgggaacagggtttgttgattcgcaaactattctaatacataattcttctgttaatacgtcttgcacgtaatctattatagatgccaagatatctatataattattttgtaagatgatgttaactatgtgatctatataagtagtgtaataattcatgtatttcgatatatgttccaactctgtctttgtgatgtctagtttcgtaatatctatagcatcctcaaaaaatatattcgcatatattcccaagtcttcagttctatcttctaaaaaatcttcaacgtatggaatataataatctattttacctcttctgatatcattaatgatatagtttttgacactatcttctgtcaattgattcttattcactatatctaagaaacggatagcgtccctaggacgaactactgccattaatatctctattatagcttctggacataattcatctattataccagaattaatgggaactattccgtatctatctaacatagttttaagaaagtcagaatctaagacctgatgttcatatattggttcatacatgaaatgatctctattgatgatagtgactatttcattctctgaaaattggtaactcattctatatatgctttccttgttgatgaaggatagaatatactcaatagaatttgtaccaacaaactgttctcttatgaatcgtatatcatcatctgaaataatcatgtaaggcatacatttaacaattagagacttgtctcctgttatcaatatactattcttgtgataatttatgtgtgaggcaaatttgtccacgttctttaattttgttatagtagatatcaaatccaatggagctacagttcttggcttaaacagatatagtttttctggaacgaattctacaacattattataaaggactttgggtagataagtgggatgaaatcctattttaattaatgcgatagccttgtcctcgtgcagatatccaaacgcttttgtgatagtatggcattcattgtctagaaacgctctacgaatatctgtgacagatatcatctttagagaatatactagtcgcgttaatagtactacaatttgtattttttaatctatctcaataaaaaaattaatatgtatgattcaatgtataactaaactactaactgttattgataactagaatcagaatctaatgatgacgtaaccaagaagtttatctactgccaatttagctgcattatttttagcatctcgtttagattttccatctgccttatcgaatactcttccgtcgatgtctacacaggcataaaatgtaggagagttactaggccccactgattcaatacgaaaagaccaatctctcctagtaatttggcagtactcattaataacggtgacagggttagcacctttccaatcaataatttttttagccggaataacatcatcaaaagacttatgatcctctctcattgatttttcgcgggatacatcatctattatggcgtcagccataacatcagcatccggcttatccgcctccgttgtcataaaccaacgaggaggaatatcgtcggagctgtacaccatagcactacgttgaagatcgtacagagctttattaacttctcgcttctccatattaagttgtctagttagttgtgcagcagtagctccttcgattccaatggttttaatagcctcacacacaatctctgcgttagaacgttcgtcgatatagattttagacatttttagagagaactaacacaaccagcaataaaactgaacctactttatcatttttttattcatcatcctctggtggttcgtcgttcctatcgaatgtggatctgattaacccgtcatctataggtgatgctggttctggagattctggaggagatggattattatctggaagaatctctgttatttccttgttttcatgtatcgattgcgttgtaacattaagattgcgaaatgctctaaatttgggaggcttaaagtgttgtttgcaatctctacacgcatgtctaactagtggaggttcgtcagcggctctagtttgaatcatcatcggcgtagtattcctacttttacagttaggacacggtgtattgtatttctcgtcgagaacgttaaaataatcgttgtaactcacatcctttattttatctatattgtattctactcctttcttaatgcattttataccgaataagagatagcgaaggaattctttttcggtgccgctagtacccttaatcatatcacatagtgttttatattccaaatttgtggcaatagacggtttatttctatacgatagtttgtttctggaatcctttgagtattctataccaatattattctttgattcgaatttagtttcttcgatattagattttgtattacctatattcttgatgtagtactttgatgatttttccatggcccattctattaagtcttccaagttggcatcatccacatattgtgatagtaattctcggatatcagtagcggctaccgccattgatgtttgttcattggatgagtaactactaatgtatacattttccatttataacacttatgtattaactttgttcatttatattttttcattattatgttgatattaacaaaagtgaatatatatgttaataattgtattgtggttatacggctacaatttcataatgagtggaagtcagtgtccgatgatcaatgacgatagctttactctgaaaagaaagtatcaaatcgatagtgcggagtcaacaataaaaatggataagaagaggataaagtttcagaatagagccaaaatggtaaaagaaataaatcagacaataagagcagcacaaactcattacgagacattgaaactaggatacataaaatttaagagaatgattaggactactactctagaagatatagcaccatctattccaaataatcagaaaacttataaactattctcggacatttcagccatcggcaaagcatcacagaatccgagtaagatggtatatgctctgctgctttacatgtttcccaatttgtttggagatgaccatagattcattcgttatagaatgcatccaatgagtaaaatcaaacacaagatcttctctcctttcaaacttaatcttattagaatattagtggaagaaagattctataataatgaatgcagatctaataaatggagaataattggaacacaagttgataaaatgttgatagctgaatctgataaatatacaatagatgcaaggtataacctaaaacccatgtatagaatcaagggaaaatctgaagaagataccctcttcatcaaacagatggtagaacaatgtgtgacatcccaggaattggtggaaaaagtgttgaagatactgtttagagatttgttcaagagtggagaatacaaagcatacagatacgatgatgatgtagaaaatggatttattggattggatacactaaaattaaacattgttcatgatatagttgaaccatgtatgcctgttcgtaggccagtggctaagatactgtgtaaagaaatggtaaataaatactttgagaatccgctacatattattggtaaaaatcttcaagagtgcattgactttgttagtgaataggcatttcatctttctccaatactaattcaaattgttaaattaataatggatagtataaatagttattagtgataaaatagtaaaaataattattagaataagagtgtagtatcatagataactctcttctataaaaatggattttattcgtagaaagtatcttatatacacagtagaaaataatatagattttttaaaggatgatacattaagtaaagtaaacaattttaccctcaatcatgtactagctctcaagtatctagttagcaattttcctcaacacgttattactaaggatgtattagctaataccaatttttttgttttcatacatatggtacgatgttgtaaagtgtacgaagcggttttacgacacgcatttgatgcacccacgttgtacgttaaagcattgactaagaattatttatcgtttagtaacgcaatacaatcgtacaaggaaaccgtgcataaactaacacaagatgaaaaatttttagaggttgccgaatacatggacgaattaggagaacttataggcgtaaattatgacttagttcttaatccattatttcacggaggggaacccatcaaagatatggaaatcatttttttaaaactgtttaagaaaacagacttcaaagttgttaaaaaattaagtgttataagattacttatttgggcatacctaagcaagaaagatacaggcatagagtttgcggataatgatagacaagatatatatactctatttcaacaaactggtagaatcgtccatagcaatctaacagaaacgtttagagattatatctttcccggagataagactagctattgggtgtggttaaacgaaagtatagctaatgatgcggatatcgttcttaatagacacgccattaccatgtatgataaaattcttagttatatatactctgagataaaacaaggacgcgttaataaaaacatgcttaagttagtttatatctttgagcctgaaaaagatatcagagaacttctgctagaaatcatatatgatattcctggagatatcctatctattattgatgcaaaaaacgacgattggaaaaaatattttattagtttttataaagctaattttattaacggtaatacatttattagtgatagaacgtttaacgaggacttattcagagttgttgttcaaatagatcccgaatatttcgataatgaacgaattatgtctttattctctacgagtgctgcggacattaaacgatttgatgagttagatattaataacagttatatatctaatataatttatgaggtgaacgatatcacattagatacaatggatgatatgaagaagtgtcaaatctttaacgaggatacgtcgtattatgttaaggaatacaatacatacctgtttttgcacgagtcggatcccatggtcatagagaacggaatactaaagaaactgtcatctataaaatccaagagtagacggctgaacttgtttagcaaaaacattttaaaatattatttagacggacaattggctcgtctaggtcttgtgttagatgattataaaggagacttgttagttaaaatgataaaccatcttaagtctgtggaggatgtatccgcattcgttcgattttctacagataaaaaccctagtattcttccatcgctaatcaaaactattttagctagttataatatttccatcatcgtcttatttcaaaggtttttgagagataatctatatcatgtagaagaattcttggataaaagcatccatctaaccaagacggataagaaatatatacttcaattgataagacacggtagatcatagaacagaccaaatatattattaataatttgtatatacatagatataattatcacatattaaaaattcacacatttttgataaatgggaactgctgcaacaattcagactcccaccaaattaatgaataaagaaaatgcagaaatgattttggaaaaaattgttgatcatatagttatgtatattagtgacgaatcaagtgattcagaaaataatcctgaatatattgattttcgtaacagatacgaagactatagatctctcattataaaaagtgatcacgagtttgtaaagctatgtaaaaatcatgcagagaaaagttctccagaaacgcaacaaatgattatcaaacacatatacgaacaatatcttattccagtatctgaagtactattaaaacctataatgtccatgggtgacataattacatataacggatgtaaagacaatgaatggatgctagaacaactctctaccctaaactttaacaatctccgcacatggaactcatgtagcataggcaatgtaacgcgtctgttttatacattttttagttatctgatgaaagataaactaaatatataagtataatcccattctaatactttaacctgatgtattacctgcatcttattagaatattaacctaactaaaagacataacataaaaactcattacatagttgataaaaagcggtaggatataaatattatggctgccaccgttccgcgttttgacgacgtgtacaaaaatgcacaaagaagaattctagatcaagaaacattttttagtagaggtctaagtagaccgttaatgaaaaacacatatctatttgataattacgcgtatggatggataccagaaactgcaatttggagtagtagatacgcaaacttagatgcaagtgactattatcccatttcgttgggattacttaaaaagttcgagtttctcatgtctctatataaaggtcctattccagtatacgaagaaaaagtaaatactgaattcatagccaatggatcgttctctggtagatacgtatcatatcttcgaaagttttctgctcttccaacaaacgagtttattagttttttgttactgacttccattccaatctataatatcttgttctggtttaaaaatactcagtttgatattactaaacacacattattcagatacgtctatacagataatgccaaacacctggcgttggctaggtatatgcatcaaacaggagactataagcctttgtttagtcgtctcaaagagaattatatatttaccggtcccgttccaataggtatcaaagatatagatcaccctaatcttagtagagcaagaagtccatccgattatgagacattagctaatattagtactatattgtactttaccaagtatgatccggtattaatgtttttattgttttacgtacctgggtattcaattactacaaaaattactccagccgtagaatatctaatggataaactgaatctaacaaagagcgacgtacaactgttgtaaattattttatgcttcgtaaaatgtaggttttgaaccaaacattctttcaaagaatgagatgcataaaactttattatccaatagattgactatttcggacgtcaatcgtttaaagtaaacttcgtaaaatattctttgatcactgccgagtttaaaacttctatcgataattgtctcatatgttttaatatttacaagttttttggtccatggtacattagccggacaaatatatgcaaaataatatcgttctccaagttctatagtttctggattatttttattatattcagtaaccaaatacatattagggttatctgcggatttataatttgagtgatgcattcgactcaacataaataattctagaggagacgatctactatcaaattcggatcgtaaatctgtttctaaagaacggagaatatctatacatacctgattagaattcatccgtccttcagacaacatctcagacagtctggttttgtacatcttaatcatattcttatgaaacttggaaacatctcttctagtttcactagtacctttattaattctctcaggtacagattttgaattcgacgatgccgagtatttcatcgttgtatatttcttcttcgattgcataatcagattcttatataccgcctcaaactctattttaaaattattaaacaatactctactattaatcagtcgttctaactctttcgctatttctatagacttatctacatcttgactgtctatctctgtaaacacggagtcggtatctccatacacgctacgaaaacgaaatctgtaatctataggcaacgatgttttcacaatcggattaatatctctatcgtccatataaaatggattacttaatggattggcaaaccgtaacataccgttagataactctgctccatttagtaccgattctagatacaagatcattctacgtcctatggatgtgcaactcttagccgaagcgtatgagtatagagcactatttctaaatcccatcagaccatatactgagttggctactatcttgtacgtatattgcatggaatcataaatggccttttcagttgaactggtagcctgttttaacatctttttatatctggctctctctgccaaaaatgttcttaatagtctaggaatggttccttctatcgatctatcgaaaattgctatttcagagatgaggttcggtagtctaggttcacaatgaaccgtaatatatctaggaggtggatatttctgaagcaatagctgattatttatttcttcttccaatctattggtactaacaacgacaccgactaatgtttccggagatagatttccaaagatacacacattaggatacagactgttataatcaaagattaatacattattactaaacattttttgttttggagcaaataccttaccgccttcataaggaaacttttgttttgtttctgatctaactaagatagttttagtttccaacaatagctttaacagtggacccttgatgactgtactcgctctatattcgaataccatggattgaggaagcacatatgttgacgcacccgcgtctgtttttgtttctactccataatactcccacaaatactgacacaaacaagcatcatgaatacagtatctagccatatctaaagctatgtttagattataatccttatacatctgagctaaatcaacgtcatcctttccgaaagataatttatatgtatcattaggtaaagtaggacataatagtacgactttaaatccattttcccaaatatctttacgaattactttacatataatatcctcatcaacagtcacataattacctgtggttaaaacctttgcaaatgcagcggctttgcctttcgcgtccgtagtatcgtcaccgatgaacgtcatttctctaactcctctatttaatactttacccatgcaactgaacgcgttcttggatatagaatccaatttgtacgaatccaatttttcagatttttgaatgaatgaatatagatcgaaaaatatagttccattattgttattaacgtgaaacgtagtattggccatgccgcctactcccttatgactagactgatttctctcataaatacagagatgtacagcttcctttttgtccggagatctaaagataatcttctctcctgttaataactctagacgattagtaatatatctcagatcaaagttatgtccgttaaaggtaacgacgtagtcgaacgttagttccaacaattgtttagctattcgtaacaaaactatttcagaacatagaactagttctcgttcgtaatccatttccattagtgactgtatcctcaaacatcctctatcgacggcttcttgtatttcctgttccgttaacatctcttcattaatgagcgtaaacaataatcgtttaccacttaaatcgatataacagtaacttgtatgcgagattgggttaataaatacagaaggaaacttcttatcgaagtgacactctatatctagaaataagtacgatcttgggatatcgaatctaggtatttttttagcgaaacagttacgtggatcgtcacaatgataacatccattgttaatctttgtcaaatattgctcgtccaacgagtaacatccgtctggagatatcccgttagaaatataaaaccaactaatattgagaaattcatccatggtggcattttgtatgctgcgtttctttggctcttctatcaaccacatatctgcgacggagcattttctatctttaatatctagattataacttattgtctcgtcaatgtctatagttctcatctttcccaacggcctcgcattaaatggaggaggagacaatgactgatatatttcgtccgtcactacgtaataaaagtaatgaggaaatcgtataaatacggtctcaccatttcgacatctggatttcagatataaaaatctgttttcaccgtgactttcaaaccaattaatgcaccgaacatccatttatagaatttagaaatatattttcatttaaatgaatcccaaacattggggaagagccgtatggaccattatttttatagtactttcgcaagcgggtttagacggcaacatagaagcgtgtaaacgaaaactatatactatagtcagcactcttccatgtcctgcatgtagacggcacgcgactatcgctatagaggacaataatgtcatgtctagcgatgatctgaattatatttattattttttcatcagattatttaacaatttggcatctgatcccaaatacgcgatcgatgtgacaaaggttaaccctttataaacttaacccattataaaacttatgattagtcacaactgaaataaccgcgtgattattttttggtataattctacacggcatggtttctgtaactatgaattcaacccccgttacattagtgaaatctttaacaaacagcaagggttcgtcaaagacataaaactcattgtttacaatcgaaatagaccccctatcacacttaaaataaaaaatatccttatcctttaccaccaaataaaattctgattggtcaatgtgaatgtattcacttaacagttccacaaatttatttattaactccgaggcacatacatcgtcggtattttttatggcaaactttactcttccagcatccgtttctaaaaaaatattaacgagttccatttatatcatccaatattattgaaatgacgttgatggacagatgatacaaataagaaggtacggtacctttgtccaccatctcctccaattcatgctctattttgtcattaactttaatgtatgaaaacagtacgccacatgcttccatgacagtgtgtaacactttggatacaaaatgtttgacattagtataattgttcaagactgtcaatctataatagatagtagctataatatattctatgatggtattgaagaagatgacaaccttggcatattgatcatttaacacagacatggtatcaacagatagcttgaatgaaagagaatcagtaattggaataagcgtcttctcgatagagtgtccgtataccaacatgtctgatattttgatgtattccattaaattatttagttttttctttttattttcgttaaacagcatttctgtcaacggaccccaacatcgttgaccgattaagttttgattgatttttccgtgtaatgcgtatctagtcagatcgtatagcctatccaataatccatcatctgtgcgtagatcacatcgtacactttttaattctctatagaagagcgacagacatctggagcaattacagacagcaatttctttattctctacagatgtaagatacttgaagacattcctatgatgatgcagaattttggataacacggtattgatggtatctgttaccataattcctttgatggctgatagtgtcagagcacaagatttccaatctttgacaatttttagcaccattatctttgttttgatatctatatcagacagcatggtgcgtctgacaacacagggattaagacggaaagatgaaatgattctctcaacatcttcaatggataccttgctattttttctggcattatctatatgtgcgagaatatcctctagagaatcagtatcctttttgatgatagtggatctcaatgacatgggacgtctaaaccttcttattttatcaccagattgcatggtgatttgtcttctttcttttatcataatgtaatctctaaattcatcggcaaattgtctatatctaaaatcataatatgagatgtttacctctacaaatatctgttcgtccaatgttagagtatctacatcagttttgtattccaaattaaacatggcaacggatttaattttatattcctctattaagtcctcgtcgataataacagaatgtagataatcatttaatccatcgtacatggttggaagatgcttgttgacaaaatctttaattgtcttgatgaaggtgggactatatctaacatcttgattaataaaatttataacattgtccataggatactttgtaactagttttatacacatctcttcatcggtaagtttagacagaatatcgtgaacaggtggtatattatattcatcagatatacgaagaacaatgtccaaatctatattgtttaatatattatatagatgtagcgtagctcctacaggaatatctttaactaagtcaatgatttcatcaaccgttagatctattttaaagttaatcatataggcattgatttttaaaaggtatgtagccttgactacattctcattaattaaccattccaagtcactgtgtgtaagaagattatattctatcataagcttgactacatttggtcccgataccattaaagaattcttatgatataaggaaacagcttttaggtactcatctactctacaagaattttggagagccttaacgatatcagtgacgtttattatttcaggaggaaaaaacctaacattgagaatgtcggagttaatagcttccagatacagtgattttggcaatagtccgtgtaatccataatccagtaacacgagctggtgcttgctagacaccttttcaatgtttaatttttttgaaataagctttgataaagccttcctcgcaaattccggatacatgaacatgtcggcgacatgattaagtattgttttttcattatttttatattttctcaacaagttctcaataccccaatagatgatagaatatcacccaatgcgtccatgttgtctatttccaacaggtcgctatatccaccaatagaagtttttccaaaaaagattctaggaacagttctaccaccagtaatttgttcaaaatagtcacgcaattcattttcgggtttaaattctttaatatcgacaatttcatacgctcctcttttgaaactaaacttatttagaatatccagtgcatttctacaaaaaggacatgtatacttgacaaaaattgtcactttgttattggccaacctttgttgtacaaattcctcggccattttaatatttaagtgatataaaactatctcgacttatttaactctttagtcgagatatatggacgcagatagctatatgatagccaactacagaaggcaaacgctataaaaaacataattacgacgagcatatttataaatatttttattcagcattacttgatatagtaatattaggcacagtcaaacattcaaccactctcgatacattaactctctcattttctttaacaaattctgcaatatcttcgtaaaaagattcttgaaactttttagaatatctatcgactctagatgaaatagcgttcgtcaacatactatgttttgtatacataaaggcgcccattttaacagtttctagtgacaaaatgctagcgatcctaggatcctttagaatcacatagattgacgattcgtctctcttagtaactctagtaaaataatcatacaatctagtacgcgaaataatattatccttgacttgaggagatctaaacaatctagttttgagaacatcgataagttcatcgggaatgacatacatactatctttaatagaactcttttcatccagttgaatggattcgtccttaaccaactgattaatgagatcttctattttatcattttccagatgatatgtatgtccattaaagttaaattgtgtagcgcttctttttagtctagcagccaatactttaacatcactaatatcgatatacaaaggagatgatttatctatggtattaagaattcgtttttcgacatctgtcaaaaccaattcctttttgcctgtatcatccagttttccatcctttgtaaagaaattattttctactagactattaataagactgataaggattcctccataattgcacaatccaaactttttaacaaaactagactttacaagatctacaggaatgcgtacttcaggtttcttagcttgtgattttttcttttgtggacattttcttgtgaccaactcatctaccatttcattgattttagcagtgaaataagctttcaatgcacgggcactgatactattgaaaacgagttgatcttcaaattccgccatttaagttcaccaaacaacttttaaatacaaatatatcaatagtagtagaataagaactataaaaaaaataataattaaccaataccaaccccaacaaccggtattattagttgatgtgactgttttctcatcacttagaacagatttaacaatttctataaagtctgtcaaatcatcttccggagaccccataaatacaccaaatatagcggcgtacaacttatccatttatacattgaatattggcttttctttatcgctatcttcatcatattcatcatcaatatcaacaagtcccagattacgagccagatcttcttctacattttcagtcattgatacacgttcactatctccagagagtccgataacgttagccaccacttctctatcaatgattagtttcttgagtgcgaatgtaatttttgtttccgttccggatctatagaaaactacaggtgtgataattgccttggccaattgtctttctcttttactgagtgattctagttcaccttctatagatctgagaatggatgattctccagtcgaaacatattctaccatggatccgtttaatttgttgatgaagatggattcatccttaaatgttttctctgtaatagtttccaccgaaagactatgcaaagaatttggaatgcgttccttgtgcttaatgtttccatagacggcttctagaagttgatacaacataggactagccgcggtaacttttatttttagaaagtatccatcgcttctatcttgtttagatttatttttataaagtttagtctctccttccaacataataaaagtggaagtcatttgactagataaactatcagtaagttttatagagatagacgaacaattagcgtattgagaagcatttagtgtaacgtattcgatacattttgcattagatttactaatcgattttgcatactctataacacccgcacaagtctgtagagaatcgctagatgcagtaggtcttggtgaagtttcaactctcttcttgattaccttactcatgattaaacctaaataattgtactttgtaatataatgatatatattttcactttatctcatttgagaataaaaatgtttttgtttaaccactgcatgatgtacagatttcggaatcgcaaaccaccagtggttttattttatccttgtccaatgtgaattgaatgggagcggatgcgggtttcgtacgtagatagtacattcccgtttttagaccgagactccatccgtaaaaatgcatactcgttagtttggaataactcggatctgctatatggatattcatagattgactttgatcgatgaaggctcccctgtctgcagccatttttatgatcgtcttttgtggaatttcccaaatagttttataaactcgcttaatatcttctggaaggtttgtattctgaatggatccaccatctgccataatcctattcttgatctcatcattccataattttctctcggttaaaactctaaggagatgcggattaactacttgaaattctccagacaatactctccgagtgtaaatattactggtatacggttccaccgactcattatttcccaaaatttgagcagttgatgcagtcggcataggtgccaccaataaactatttctaagaccgtatgttctgattttatcttttagaggttcccaattccaaagatccgacggtacaacattccaaagatcatattgtagaataccgttactggcgtacgatcctacatatgtatcgtatggtccttccttctcagctagttcacaactcgcctctaatgcaccgtaataaatggtttcgaagatcttcttatttagatcttgtgcttccaggctatcaaatggataatttaagagaataaacgcgtccgctaatccttgaacaccaataccgataggtctatgtctcttattagagatttcagcttctggaataggataataattaatatctataattttattgagatttctgacaattactttgaccacatccttcagtttgagaaaatcaaatcgcccatctattacaaacatgttcaaggcaacagatgccagattacaaacggctacctcattagcatccgcatattgtattatctcagtgcaaagattactacacttgatagttcctaaattttgttgattactctttttgttacacgcatccttataaagaatgaatggagtaccagtttcaatctgagattctataatcgctttccagacgactcgagcctttattatagatttgtatctcctttctctttcgtatagtgtatacaatcgttcgaactcgtctccccaaacattgtccaatccaggacattcatccggacacatcaacgaccactctccgtcatccttcactcgtttcataaagagatcaggaatccaaagagctataaatagatctctggttctatgttcctcgtttcctgtattctttttaagatcgaggaacgccataatatcagaatgccacggttccaagtatatggccataactccaggccgtttgtttcctccctgatctatgtatctagcggtgttattataaactctcaacattggaataataccgtttgatataccattggtaccggagatatagcttccactggcacgaatattactaattgatagacctattccccctgccattttagagattaatgcgcatcgttttaacgtgtcatagataccctctatgctatcatcgatcatgttaagtagaaaacagctagacatttggtgacgactagttcccgcattaaataaggtaggagaagcgtgcgtaaaccatttttcagaaagtagattgtacgtctcaatagctgagtctatatcccattgatgaattcctactgcgacacgcattaacatgtgctgaggtctttcaacgatcttgttgtttattttcaacaagtaggatttttccaaagttttaaaaccaaaatagttgtatgaaaagtctcgttcgtaaataataaccgagttgagtttatccttatatttgttaactatatccatggtgatacttgaaataatcggagaatgtttcccatttttaggattaacatagttgaataaatcctccatcacttcactaaatagtttttttgtttccttgtgtagatttgatacggctattctggcggctagaatggcataatccggatgttgtgtagtacaagtggctgctatttcggctgccagagtgtccaattctaccgttgttactccattatatattccttgaataaccttcatagctattttaataggatctatatgatccgtgtttaagccataacataattttctaatacgagacgtgattttatcaaacatgacattttccttgtatccatttcgtttaatgacaaacatttttgttggtgtaataaaaaaattatttaacttttcattaatagggatttgacgtatgtagcgtacaaaattatcgttcctggtatatagataaagagtcctatatatttgaaaatcgttacggctcgattaaactttaatgattgcatagtgaatatatcattaggatttaactccttgactatcagggcggcaccagaaattaccatcaaaagcattaatacagttatgccgatcgcagttagaacggttatagcatccaccatttatatctaaaaattagatcaaagaatatgtgacaaagtcctagttgtatactgagaattgacgaaacaatgtttcttacatatttttttcttattagtaactgacttaatagtaggaactggaaagctagacttgattattctataagtatagatacccttccaaataatattctctttgataaaagttccagaaaatgtagaattttttaaaaagttatcttttgctattaccaagattgtgtttagacgcttattattaatatgagtgatgaaatccacaccgcctctagatatcgcttttatttccacattagatggtaaatccaatagtgaaactatctttttaggaatgtatggactcgcgtttagaggagtgaacgtcttaggcgtcggaaaggatgattcatcaaacgaataaacaatttcacaaatggatgttaatgtattagtaggaaattttttgacgctagtggaattgaagattctaatggatgatgttctacctatttcatccgataacatgttaatttccgacaccaacggttttaatatttcgatgatatacggtagtctctctttcggacttatatagcttattccacaatacgagtcattatatactccaaaaaacaaaataactagtataaaatctgtatcgaatgggaaaaacgaaattatcgacataggtatagaatctggaacattgaacgtattaatacttaattctttttctgtggtaagtaccgataggttattgacattgtatggttttaaatattctataacttgagacttgatagatattagtgatgaattgaaaattatttttatcaccacgtgtgtttcaggatcatcgtcgacgcccgtcaaccaaccgaatggagtaaaataaatatcattaatatatgctctagatattagtatttttatcaatcctttgattatcatcttctcgtaggcgaatgattccatgatcaagagtgatttaagaacatcctccggagtattaatgggcttagtaaacagtccatcgttgcaataataaaagttatccaagttaaaggatattatgcattcgtttaaagatatcacctcatctgacggagacaattttttggtaggttttagagactttgaagctacttgtttaacaaagttattcatcgtcgtttactattctatttaattttgtagttaatttatcacatatcacattaattgactttttggtccatttttccatacgtttatattcttttaatcctgcgttatccgtttccgttatatccagggatagatcttgcaagttaaatagaatgctcttaaataatgtcatttttttatccgctaaaaatttaaagaatgtataaacttttttcaaagatttaaaacttttaggtggagttctagtacacaatatcataaacaaactaataaacatcccgcattcagattccaacagctgattaacttccacattaatacagcctattttcgctccaaatgtacattcgaaaaatctgaataaaacatcgatgtcacaatttgtattatccaatacagaatgtctgtgattcgtgttaaaaccatcggagaaggaatagaaataaaaattattatagtggtggaattcagttggaatattgcctccggagtcataaaaggatactaaacattgttttttatcataaattacacatttccaatgagacaaataacaaaatccaaacattacaaatctagaggtagaacttttaattttgtctttaagtatatacgataagatatgtttattcataaacgcgtcaaatttttcatgaatcgctaaggagtttaagaatctcatgtcaaattgtcctatataatccacttcggatccataagcaaactgagagactaagttcttaatacttcgattgctcatccaggctcctctctcaggctctattttcatcttgacgacctttggattttcaccagtatgtattcctttacgtgataaatcatcgattttcaaatccatttgtgagaagtctatcgccttagatactttttcccgtagtcgaggtttaaagaaatacgctaacggtatactagtaggtaactcaaagacatcatatatagaatggtaacgcgtctttaactcgtcggttaactctttcttttgatcgagttcgtcgctactattgggtctgctcaggtgccccgactctactagttccaacatcataccgataggaatacaagacactttgccagcggttgtagatttatcatatttctccactacatatccgttacaatttgttaaaaatttagatacatctatattgctacataatccagctagtgaatatatatgacataataaattggtaaatcctagttctggtattttactaattactaaatctgtatatctttccatttatcatggaaaagaatttaccagatatcttcttttttccaaactgcgttaatgtattctcttacaaatattcacaagatgaattcagtaatatgagtaaaacggaacgtgatagtttctcattggcggtgtttccagttataaaacatagatggcataacgcacacgttgtaaaacataaaggaatatacaaagttagtacagaagcacgtggaaaaaaagtatctcctccatcactaggaaaacccgcacacataaacctaaccgcgaagcaatatatatacagtgaacacacaataagctttgaatgttatagttttctaaaatgtataacaaatacagaaatcaattcgttcgatgagtatatattaagaggactattagaagctggtaatagtttacagatattttccaattccgtaggtaaacgaacagatactataggtgtactagggaataagtatccatttagcaaaattccattggcctcattaactcctaaagcacaacgagagatattttcagcgtggatttctcatagacctgtagttttaactggaggaactggagtgggtaagacgtcacaggtacccaagttattgctttggtttaattatttatttggtggattctctactctagataaaatcactgactttcacgaaagaccagtcattctatctcttcctaggatagctttagttagattgcatagcaataccattttaaaatcattgggatttaaggtactagatggatctcctatttctttacggtacggatctataccggaagaattaataaacaaacaaccaaaaaaatatggaattgtattttctacccataagttatctctaacaaaactatttagttatggcactcttattatagacgaagttcatgagcatgatcaaataggagatattattatagcagtagcgagaaagcatcatacgaaaatagattctatgtttttaatgactgccacgttagaggatgacagggaacggctaaaagtatttttacctaatcccgcatttatacatattcctggagatacactgtttaaaattagcgaggtatttattcataataagataaatccatcttccagaatggcatacatagaagaagaaaagagaaatttagttactgctatacagatgtatactcctcctgatggatcatccggtatagtctttgtggcatccgttgcacagtgtcacgaatataaatcatatttagaaaaaagattaccgtatgatatgtatattattcatggtaaggtcttagatatagacgaaatattagaaaaagtgtattcatcacctaatgtatcgataattatttctactccttatttggaatccagcgttactatacacaatgttacacacatttatgatatgggtagagtttttgtccccgctccttttggaggatcgcaacaatttatttctaaatctatgagagatcaacgaaaaggaagagtaggaagagttaatcctggtacatacgtctatttctatgatctgtcttatatgaagtctatacagcgaatagattcagaatttctacataattatatattgtacgctaataagtttaatctaacactccccgaagatttgtttataatccctacaaatttggatattctatggcgtacaaaggaatatatagactcgttcgatattagtacagaaacatggaataaattattatccaattattatatgaagatgatagagtatgctaaactttatgtactaagtcctattctcgctgaggagttggataactttgagaggacgggagaattaactagtattgtacgagaagccattttatctctaaatttacgaattaagattttaaattttaaacataaagatgatgatacgtatatacacttttgtaaaatattattcggtgtctataacggaacaaacgctactatatattatcatagacctctaacgggatatatgaatatgatttcagatactatatttgttcctgtagataataactaaaaatcaaactctaatgaccacatctttttttagagatgaaaaattttctacatctccttttgtagacacgactaaacattttgcagaaaaaagtttattagtgtttagataatcgtatacttcatcagtgtagatagtaaatgtgaacagataaaaggtattcttgctcaatagattggtaaattccatagaatatattaatcctttcttcttgagatcccacatcatttcaaccagagacgttttatccaatgatttacctcgtactataccacatacaaaactagattttgcagtgacgtcgtacctggtattcctaccaaacaaaattttacttttagttcttttagaaaattctaaggtagaatctctatttgccaatatgtcatctatggaattaccactagcaaaaaatgatagaaatatatattgatacatcgcagctggttttgatctactatactttaaaaacgaatcagattccataattgcctgtatatcatcagctgaaaaactatgttttacacgtattccttcggcatttctttttaatgatatatcttgtttagacaatgataaagttatcatgtccatgagagacgcgtctccgtatcgtataaatatttcattagatgttagacgcttcattaggggtatacttctataaggtttcttaatcagtccatcattggttgcgtcaagaactactatcggatgttgttgggtatctctagtgttacacatggccttactaaagtttgggtaaataactatgatatctctattaattatagatgcatatatttcattcgtcaaggatattagtatcgacttgctatcgtcattaatacgtgtaatgtaatcatataaatcatgcgatagccaaggaaaatttaaatagatgttcatcatataatcgtcgctataattcatattaatacgttgacattgactaatttgtaatatagcctcgccacgaagaaagctctcgtattcagtttcatcgataaaggataccgttaaatataactggttgccgatagtctcatagtctattaagtggtaagtttcgtacaaatacagaatccctaaaatattatctaatgttggattaatctttaccataactgtataaaatggagacggagtcataactattttaccgtttgtacttactggaatagatgaaggaataatctccggacatgctggtaaagacccaaatgtctgtttgaagaaatccaatgttccaggtcctaatctcttaacaaaaattacgatattcgatcccgatatcctttgcattctatttaccagcatatcacgaactatattaagattatctatcatgtctattctcccaccgttatataaatcgcctccgctaagaaacgttagtatatccatacaatggaatacttcatttctaaaatagtattcgttttctaattctttaatgtgaaatcgtatactagaaagggaaaaattatctttgagttttccgttagaaaagaaccacgaaactaatgttctgattgcgtccgattccgttgctgaattaatggatttacaccaaaaactcatataacttctagatgtagaagcattcgctaaaaaattagtagaatcaaaggatataagtagatgttccaacaagtgagcaattcccaagatttcatctatatcattctcgaatccgaaattagaaattcccaagtagatatcctttttcatccgatcgttgatgaaaatacgaactttattcggtaagacaatcatttactaaggagtaaaataggaagtaatgttcgtatgtcgttatcatcgtataaattaaaggtgtgttttttaccattaagtgacattataattttaccaatattggaattataatataggtgtatttgcgcactcgcgacggttgatgcatcggtaaatatagctgtatctaatgttctagtcggtatttcatcatttcgctgtctaataatagcgttttctctatctgtttccattacagctgcctgaagtttattggtcggataatatgtaaaataataagaaatacatacgaataacaaaaataaaataagatataataaagatgccatttagagatctaattttgttcaacttgtccaaattcctacttacagaagatgaggaatcgttggagatagtgtcttccttatgtagaggatttgaaatatcttatgatgacttgataacttactttccagataggaaataccataaatatatttataaagtatttgaacatgtagatttatcggaggaattaagtatggaattccatgatacaactttgcgagatttagtttatcttagattgtacaagtattccaagtgtatacggccgtgttataaattaggagataatctaaaaggcatagttgttataaaggacaggaatatttatattagggaagcaaatgatgacttgatagaatatctcctcaaggaatacactcctcagatttatacatattctaatgagcgcgtccccataactggttcaaaattaattctttgtggattttctcaagttacatttatggcgtatacaacgtcgcatataacaacaaataaaaaggtagatgttctcgtttccaaaaaatgtatagatgaactagtcgatccaataaattatcaaatacttcaaaatttatttgataaaggaagcggaacaataaacaaaatactcaggaagatattttattcggtaaccggtggccaaactccataggtagctttttctatttcggattttagaatttccaaattcaccagcgatttatcggttttggtgaaatccaaggatttattaatgtccacaaatgccatttgttttgtctgtggattgtatttgaaaatggaaacgatgtagttagatagatgcgctgcgaagtttcctattagggttccgcgcttcacgtcacccagcatacttgaatcaccatcctttaaaaaaaatgataagatatcaacatggagtatatcatactcggattttaattcttctactgcatcactgacattttcacaaatactacaatacggtttaccgaaaataatcagtacgttcttcatttatgggtatcaaaaacttaaaatcgttactgctggaaaataaatcactgacgatattagatgataatttatacaaagtatacaatggaatatttgtggatacaatgagtatttatatagccgtcgccaattgtgtcagaaacttagaagagttaactacggtattcataaaatacgtaaacggatgggtaaaaaagggagggcatgtaaccctttttatcgatagaggaagtataaaaattaaacaagacgttagagacaagagacgtaaatattctaaattaaccaaggacagaaaaatgctagaattagaaaagtgtacatccgaaatacaaaatgttaccggatttatggaagaagaaataaaggcaaaaatgcaattaaaaatcgataaacttacatttcaaatatatttatctgattctgataacataaaaatatcattgaatgagatactaacacatttcaacaataatgagaatgttacattattttattgtgatgaacgagacgcagaattcgttatgtgtctcgaggctaaaacacatttctctaccacaggagaatggccgttgataataagtaccgatcaggatactatgctatttgcatctactgataatcatcctaagatgataaaaaacttaactcaactgtttaaatttgttccctcggcagaggataactatttagcaaaattaacggcgttagtgaatggatgtgatttctttcctggactctatggggcatctataacacccaccaacttaaacaaaatacaattgtttagtgattttacaatcgataatatagtcactagtttggcaattaaaaattattatagaaagactaactctaccgtagacgtgcgtaatattgttacgtttataaacgattacgctaatttagacgatgtctactcgtatgttcctccttgtcaatgcactgttcaagaatttatattttccgcattagatgaaaaatggaatgaatttaaatcatcttatttagagaccgttccgttaccctgtcaattaatgtacgcgttagaaccacgtaaggagattgatgtttcagaagttaaaactttatcatcttatatagatttcgaaaatactaaatcagatatcgatgttataaaatctatatcctcgatttttggatattctaacgaaaactgtaacacgatagtattcggcatctataaggataatttactactgagtataaataattcattttactttaacgatagtctgttaataaccaatactaaaagtgataatataataaatataggttactagattaaaaatggtgttccaactcgtgtgctctacatgcggtaaagatatttctcacgaacgatataaattgattatacgaaaaaaatcattaaaggatgtactcgtcagtgtaaagaacgaatgttgtaggttaaaattatctacacaaatagaacctcaacgtaacttaacagtgcaacctctattggatataaactaatatggatccggttaattttatcaagacatatgcgcctagaggttctattatttttattaattataccatgtcattaacaagtcatttgaatccatcgatagaaaaacatgtgggtatttattatggtacgttattatcggaacacttggtagttgaatctacctatagaaaaggagttcgaatagtcccattggatagtttttttgaaggatatcttagtgcaaaagtatacatgttagagaatattcaagttatgaaaatagcagctgatacgtcattaactttattgggtattccgtatggatttggtcatgatagaatgtattgttttaaattggtagctgactgttataaaaatgccggtgttgaaacatcgtctaaacgaatattaggtaaagatatttttctgagccaaaacttcacagacgataatagatggataaagatatatgattctaataatttaacattttggcaaattgattaccttaaagggtgagttaatatgcataactactcctccgttgttttttccctcgttctttttcttaacgttgtttgccatcactctcataatgtaaagatattctaaaatggtaaacttttgcatatcggacgcagaaattggtataaatgttgtaattgtattatttcccgtcaatggactagtcacagctccatcagttttatatcctttagagtatttctcactcgtgtctaacattctagagcattccatgatctgtttatcgttgatattggccggaaagatagattttttattttttattatattactattggcaattgtagatataacttctggtaaatatttttctaccttttcaatctcttctattttcaagccggctatatattctgctatattgttgctagtatcaataccttttcttgctaagaagtcatatgtggtattcactatatcagttttaactggtagttccattagcctttccacttctgcagaataatcagaaattggttctttaccagaaaatccagctactataataggctcaccgatgatcattggcaaaatcctatattgtaccagattaatgagagcatatttcatttccaataattctgctagttcttgagacattgatttatttgatgaatctagttggttctctagatactctaccatttctgccgcatacaataacttgttagataaaatcagggttatcaaagtgtttagcgtggctagaatagtgggcttgcatgtattaaagaatgcggtagtatgagtaaaccgttttaacgaattatatagtctccagaaatctgtggcgttacatacatgagccgaatgacatcgaagattgtccaatatttttaatagctgctctttgtccattatttctatatttgactcgcaacaattgtagataccattaatcactgattcctttttcgatgccggacaatagcacaattgtttagctttggactctatgtattcagaattaatagatatatctcttaatacagattgcactatacattttgaaactatgtcaaaaattgtagaacgacgctgttctgcagccatttaactttaaataatttacaaaaatttaaaatgagcatccgtataaaaatcgataaactgcgccaaattgtggcatatttttcagagttcagtgaagaagtgtctataaatgtagactcgacggatgagttaatgtatatttttgccgccttgggcggatctgtaaacatttgggccattatacctctcagtgcatcagtgttctaccgcggagccgaaaatattgtgtttaatcttccggtgtccaaggtaaaatcgtgtttgtgtagttttcacaatgatgccatcatagatatagaacctgatctggaaaataatctagtaaaactttctagttatcatgtagtaagtgtcgattgtaacaaggaactgatgcctattaggacagatactactatttgtctaagtatagatcaaaagaaatcttacgtgtttaattttcacaagtatgaagaaaaatgttgtggtagaaccgtcattcatttagaatggttgttgggctttatcaagtgtattagtcagcatcagcatttggctattatgtttaaagatgacaatattattatgaagactcctggtaatactgatgcgttttccagggaatattctatgactgaatgttctcaagaactacaaaagttttctttcaaaatagctatctcgtctctcaacaaactacgaggattcaaaaagagagtcaatgtttttgaaactagaatcgtaatggataatgacgataacattctaggaatgttgttttcggatagagttcaatcctttaagatcaacatctttatggcgtttttagattaatactttcaatgagataaatatgggtggcggagtaagtgttgagctccctaaacgggatccgcctccgggagtacccactgatgagatgttattaaacgtggataaaatgcatgacgtgatagctcccgctaagcttttagaatatgtgcatataggaccactagcaaaagataaagaggataaagtaaagaaaagatatccagagtttagattagtcaacacaggacccggtggtctttcggcattgttaagacaatcgtataatggaaccgcacccaattgctgtcgcacttttaatcgtactcattattggaagaaggatggaaagatatcagataagtatgaagagggtgcagtattagaatcgtgttggccagacgttcacgacactggaaaatgcgatgttgatttattcgactggtgtcagggggatacgttcgatagaaacatatgccatcagtggatcggttcagcctttaataggagtgatagaactgtagagggtcaacaatcgttaataaatctgtataataagatgcaaacattatgtagtaaagatgctagtgtaccaatatgtgaatcatttttgcatcatttacgcgcacacaatacagaagatagcaaagagatgatcgattatattctaagacaacagtctgcggactttaaacagaaatatatgagatgtagttatcccactagagataagttagaagagtcattaaaatatgcggaacctcgagaatgttgggatccagagtgttcgaatgccaatgttaatttcttactaacacgtaattataataatttaggactttgcaatattgtacgatgtaatactagcgtgaacaacttacagatggataaaacttcctcattaagattgtcatgtggattaagcaatagtgatagattttctactgttcccgtcaatagagcaaaagtagttcaacataatattaaacattcgttcgacctaaaattgcatttgatcagtttattatctctcttggtaatatggatactaattgtagctatttaaatgggtgccgcggcaagcatacagacgacggtgaatacactcagcgaacgtatctcgtctaaattagaacaagaagcgaacgctagtgctcaaacaaaatgtgatatagaaatcggaaatttttatatccgacaaaaccatggatgtaacctcactgttaaaaatatgtgctctgcggacgcggatgctcagttggatgctgtgttatcagccgctacagaaacatatagtggattaacaccggaacaaaaagcatacgtgccagctatgtttactgctgcgttaaacattcagacaagtgtaaacactgttgttagagattttgaaaattatgtgaaacagacttgtaattctagcgcggtcgtcgataacaaattaaagatacaaaacgtaatcatagatgaatgttacggagccccaggatctccaacaaatttggaatttattaatacaggatctagcaaaggaaattgtgccattaaagcgttgatgcaattgacgactaaggccactactcaaatagcacctagacaagttgctggtacaggagttcagttttatatgattgttatcggtgttataatattggcagcgttgtttatgtactatgccaagcgtatgctgttcacatccaccaatgataaaatcaaacttattttagccaataaggaaaacgtccattggactacttacatggacacattctttagaacttctccgatggttattgctaccacggatatacaaaactgaaaatatattgataatattttaatagattaacatggaagttatcgctgatcgtctagacgatatagtgaaacaaaatatagcggatgaaaaatttgtagattttgttatacacggtctagagcatcaatgtcctgctatacttcgaccattaattaggttgtttattgatatactattatttgttatagtaatttatatttttacggtacgtctagtaagtagaaattatcaaatgttgttggtggcgctagtcatcacattaactattttttattactttatactataatagtactagactgacttctaacaaacatctcacctgccataaataaatgcttgatattaaagtcttctatttctaacactattccatctgtggaaaataatactctgacattatcgctaattgacacatcggtgagtgatatgcctataaagtaataatcttctttgggcacatataccagtgtaccaggttctaacaacctatttactggtgctcctgtagcatactttttctttaccttgagaatatccatcgtttgcttggtcaatagcgatatgtgattttttatcaaccactcgaaaaagtaattggagtgttcatatcctctacgggctattgtctcatggccgtgtatgaaatttaagtaacacgactgtggtagatttgttctatagagccggttgccgcaaatagatagaactaccaatatgtctgtacaaatgttaaacattaattgattaacagaaaaaacaatgttcgttctgggaatagaaaccagatcaaaacaaaattcgttagaatatatgccacgtttatacattgaatataaaataactacagtttgaaaaataacagtatcatttaaacatttaacttgcggggttaatctcacaactttactgtttttaaactgttcaaaatatagcatcgatccatgagaaatacgtttagccgcctttaatagaggaaatcccaccgcctttctggatctcaccaacgacgatagttctgaccagcaactcatttcttcatcatccacctgttttaacatataataggcaggagatagatatccgtcattgcaatattccttctcgtaggcacacaatctaatattgataaaatctccattctcttctctgcatttattatcttgtttcggtggctgattaggctgtagtcttggtttaggctttggtatatcgttgttgaatctattttggtcattaaatctttcatttcttcctggtatatttttatcacctcgtttggttggatttttgtctatattatcgtttgtaacatcggtacgggtattcatttatcacaaaaaaaacttctctaaatgagtctactgctagaaaacctcatcgaagaagataccatattttttgcaggaagtatatctgagtatgatgatttacaaatggttattgccggcgcaaaatccaaatttccaagatctatgctttctatttttaatatagtacctagaacgatgtcaaaatatgagttggagttgattcataacgaaaatatcacaggagcaatgtttaccacaatgtataatataagaaacaatttgggtctaggagatgataaactaactattgaagccattgaaaactatttcttggatcctaacaatgaagttatgcctcttattattaataatacggatatgactgccgtcattcctaaaaaaagtggtaggagaaagaataagaacatggttattttccgtcaaggatcatcacctatcttgtgtattttcgaaactcgtaaaaagattaatatttataaagaaaatatggaatccgcatcgactgagtatacacctatcggagacaacaaggctttgatatctaaatatgcgggaattaatatcctaaatgtgtattctccttccacatccataagattgaatgccatttacggattcaccaataaaaataaactagagaaacttagtactaataaggaactagaatcgtatagttctagccctcttcaagaacccattaggttaaatgattttctgggactattggaatgtgttaaaaagaatattcctctaacagatattccgacaaaggattgattactataaatggagaatgttcctaatgtatactttaatcctgtgtttatagagcccacgtttaaacattctttattaagtgtttataaacacagattaatagttttatttgaagtattcgttgtattcattctaatatatgtattttttagatctgaattaaatatgttcttcatgcctaaacgaaaaatacccgatcctattgatagattacgacgtgctaatctagcgtgtgaagacgataaattaatgatctatggattaccatggatgacaactcaaacatctgcgttatcaataaatagtaaaccgatagtgtataaagattgtgcaaagcttttgcgatcaataaatggatcacaaccagtatctcttaacgatgttcttcgcagatgatgattcattttttaagtatttggctagtcaagatgatgaatcttcattatctgatatattgcaaatcactcaatatctagactttctgttattattattgatccaatcaaaaaataaattagaagccgtgggtcattgttatgaatctctttcagaggaatacagacaattgacaaaattcacagactttcaagattttaaaaaactgtttaacaaggtccctattgttacagatggaagggtcaaacttaataaaggatatttgttcgactttgtgattagtttgatgcgattcaaaaaagaatcctctctagctaccaccgcaatagatcctattagatacatagatcctcgtcgcgatatcgcattttctaacgtgatggatatattaaagtcgaataaagtgaacaataattaattctttattgtcatcatgaacggcggacatattcagttgataatcggccccatgttttcaggtaaaagtacagaattaattagacgagttggtaccaaaaattgaaaataaatacaaaggttcttgagggttgtgttaaattgaaagcgagaaataatcataaatactgcagaccatggaaaccgacacacttttgctctgggtactcctgttgtgggtgccaggttcaacaggggatgaagtgcaactggtcgagagtggaggaggcctcgtgcaaccggggggatcacttcggctgagctgcgcagcatctggctttaccatctccgattactggatacactgggttagacaagcaccaggtaaagggctggagtgggtggcaggcatcacgccggcaggagggtacacctattacgctgattctgtgaaaggccgatttactataagtgcagacacgtctaagaatacggcttatctgcaaatgaattcccttagggcagaggatacagctgtttattactgtgctcggtttgtgttcttcctcccgtacgcaatggactactggggtcaagggaccctggttacagttagtagtgggggaggaggttccggaggtgggggaagtggtggcggtggatctgatatccaaatgactcagagcccaagctcactttcagcatctgtaggagatcgcgtgacaataacgtgtcgcgcgtctcaggatgtgtccacggcagtcgcatggtaccaacaaaagccggggaaagctcccaagttgctcatctattctgcctcttttctttatagtggggtaccgagcagattctccggtagtggctccggtaccgactttacgctcacaataagttcactccagcccgaggatttcgcgacctactattgtcaacaggggtatggcaacccattcactttcggacagggaactaaagtcgaaattaaacgcggtggtggaggatcagggggcggcggatctgggggaggggggagccaagttcaattggtcgaaagtggagccgaagtgaaaaagcccggggcgtcagtcaaggtaagttgtaaggcttctggttacactttcacgggttattatatgcattgggtgcgccaagccccggggcagggattggaatggatggggtggataaaccctaatagcggcggaacaaactacgcccagaagttccagggaagagtaaccatgacgagagataccagtatctcaacggcatatatggagctttctcgccttaggagtgacgatacagcagtctactattgtgctcgctctcccaatccatattattatgattcctctggctattactacccaggggcctttgatatatggggacagggaacaatggttaccgttagtagcggcggtggtggatctggcgggggaggctcaggtggaggtggttcacaacccggccttacgcagcccccaagcgtgagcgtcgccccaggccaaacagctaggataacgtgcggtggcaataacatcggaagtaaaagtgtccactggtatcagcagaaaccgggtcaggccccggtcctcgttgtctatgacgactctgaccggccctcaggaatcccggagcggttttcagggtctaactcaggtaacaccgcaactttgactatttcacgcgtcgaagcaggtgatgaagccgattactattgtcaggtgtgggacagcagctccgaccactacgtctttggtactggcactaaggtcacggtcctgggacaatgattaattaatttttataaaaattgaaattttattttttttttttggaatataaatactcgagaccatgttcataaacataaaatccattctttggatgtgttccacactgattgtgactcatgcgctccataaggtcaaggtggggaaaagtccgccggttagagggagtctttccggaaaagtgtctcttccatgccattttagcaccatgcctactttgccgccgtcctacaatacatccgaattccttcgcataaaatggtcaaaaatcgaggtcgataaaaatggaaaggatctgaaagagacgactgtcttggtcgcccaaaacggaaatataaaaatcggacaagattacaaaggccgcgtgtcagttccgacgcatcccgaggctgtaggagatgcgagcttgactgtcgtaaaattgctcgctagcgatgctggactttaccgatgtgacgtgatgtacggtatcgaagatactcaagacactgtatctctcacagtagatggggtcgtcttccactatagggcggcaacctcccggtatactctcaattttgaggcggcgcagaaggcatgtctcgacgtcggggctgttatcgccacaccggaacagctctttgccgcttatgaggatggtttcgagcaatgtgacgccggttggctcgccgatcagacggttcgatatcccattcgggcgccgagggtgggctgttatggagataagatgggcaaagcaggtgtcaggacatatggattccgcagcccacaggaaacgtatgatgtgtactgctacgttgatcatctggacggagatgtctttcacctgacggtgccctccaaattcacttttgaggaggccgctaaagaatgtgagaatcaggatgcacgactcgcgaccgtaggtgagctgcaagcggcgtggaggaatgggttcgatcagtgtgactacgggtggctgtcagacgcctctgtcaggcaccctgtaactgtcgcaagagcgcaatgcggcggggggctcctgggagtacgaacgctctacaggtttgaaaaccagactggttttcctccaccagattcacgctttgatgcatattgcttcaagcgacggatgtcagacctgagtgtgattggacatcccatagattcagagtctaaggaagacgagccctgctccgaagaaacggacccagtccacgatctgatggctgaaatcctccccgagttccctgatattatagaaatagatctttatcactctgaggaaaatgaagaggaagaagaggagtgcgcaaacgccacggatgttacaacgacccccagtgtccagtatatcaatggaaagcaccttgttacgacagttcctaaggacccagaagctgctgaatgattaattaatttttatgagctcggaggtaatgatatgtatcaatcggtgtgtagaaagtgttacatcgactcataatattatattttttatctaaaaaactaaaaataaacattgattaaattttaatataatacttaaaaatggatgttgtgtcgttagataaaccgtttatgtattttgaggaaattgataatgagttagattacgaaccagaaagtgcaaatgaggtcgcaaaaaaactaccgtatcaaggacagttaaaactattactaggagaattattttttcttagtaagttacagcgacacggtatattagatggtgccaccgtagtgtatataggatcggctcctggtacacatatacgttatttgagagatcatttctataatttaggagtgatcatcaaatggatgctaattgacggccgccatcatgatcctattttaaatggattgcgtgatgtgactctagtgactcggttcgttgatgaggaatatctacgatccatcaaaaaacaactgcatccttctaagattattttaatttctgatgtaagatccaaacgaggaggaaatgaacctagtacggcggatttactaagtaattacgctctacaaaatgtcatgattagtattttaaaccccgtggcatctagtcttaaatggagatgcccgtttccagatcaatggatcaaggacttttatatcccacacggtaataaaatgttacaaccttttgctccttcatattcagctgaaatgagattattaagtatttataccggtgagaacatgagactgactcgagttaccaaattagacgctgtaaattatgaaaaaaagatgtactaccttaataagatcgtccgtaacaaagtagttgttaactttgattatcctaatcaggaatatgactattttcacatgtactttatgctgaggaccgtgtactgcaataaaacatttcctactactaaagcaaaggtactatttctacaacaatctatatttcgtttcttaaatattccaacaacatcaactgaaaaagttagtcatgaaccaatacaacgtaaaatatctagcaaaaattctatgtctaaaaacagaaatagcaagagatccgtacgcggtaataaatagaaacgtgctactgagatatactaccgatatagagtataatgatttagttactttaataaccgttagacataaaattgattctatgaaaactgtgtttcaggtatttaacgaatcatccataaattatactccggttgatgatgattatggagaaccaatcattataacatcgtatcttcaaaaaggtcataacaagtttcctgtaaattttctatacatagatgtggtaatatctgacttatttcctagctttgttagactagatactacagaaactaatatagttaatagtgtactacaaacaggcgatggtaaaaagactcttcgtcttcccaaaatgttagagacggaaatagttgtcaagattctctatcgccctaatataccattaaaaattgttagatttttccgcaataacatggtaactggagtagagatagccgatagatctgttatttcagtcgctgattaatcaattagtagagatgagataagaacattataataatcaataatattatcttatatctcgtttagaaaaatgctaatattaaaatagctaacgctagtaatccaatcggaagccatttgatatctataatagggtatctaatttcctgattcagatagcggacagctatattctcggtagctactcgtttggaatcacaaacattatttacatctaatttactatctgtaatggaaacgtttcccaatgaaatggtacaatccgatacattgcattttgttatatttttttttaaagaggctggtaacaacgcatcgcttcgtttacatggctcgtaccaacaataatagggtaatcttgtatctattcctatccgtactatgcttttatcaggataaatacatttacatcgtatatcgtctttgttagcatcacagaatgcataaatttgttcgtccgtcatgataaaaatttaaagtgtaaatataactattatttttatagttgtaataaaaagggaaatttgattgtatactttcggttctttaaaagaaactgacttgataaaaatggctgtaatctctaaggttacgtatagtctatatgatcaaaaagagattaatgctacagatattatcattagtcatgttaaaaatgacgacgatatcggtaccgttaaagatggtagactaggtgctatggatggggcattatgtaaaacttgtgggaaaacggaattggaatgtttcggtcactggggtaaagtaagtatttataaaactcatatagttaagcctgaatttatttcagaaattattcgtttactgaatcatatatgtattcactgcggattattgcgttcacgagaaccgtattccgacgatattaacctaaaagagttatcgggacacgctcttaggagattaaaggataaaatattatccaagaaaaagtcatgttggaacagcgaatgtatgcaaccgtatcaaaaaattactttttcaaagaaaaaggtttgtttcgtcaacaagttggatgatattaacgttcctaattctctcatctatcaaaagttaatttctattcatgaaaagttttggccattattagaaattcatcaatatccagctaacttattttatacagactactttcccatccctccgctgattattagaccggctattagtttttggatagatagtatacccaaagagaccaatgaattaacttacttattaggtatgatcgttaagaattgtaacttgaatgctgatgaacaggttatccagaaggcggtaatagaatacgatgatattaaaattatttctaataacactaccagtatcaatttatcatatattacatccggcaaaaataatatgattagaagttatatcgtcgcccgacgaaaagatcagaccgctagatctgtaattggtcccagtacatctatcaccgttaatgaggtaggaatgcccgcatatattagaaatacacttacagaaaagatatttgttaatgcctttacagtggataaagttaaacaactattagcgtcaaaccaagttaaattttactttaataaacgattaaaccaattaacaagaatacgccaaggaaagtttatcaaaaataaaatacatttattgcctggtgattgggtagaagtagctgttcaagaatatacaagtattatttttggaagacagccgtctctacatagatacaacgtcatcgcttcatctatcagagctaccgaaggagatactatcaaaatatctcccggaattgccaactctcaaaatgctgatttcgacggagatgaagaatggatgatattggagcaaaatcctaaagccgtaattgaacaaagtattcttatgtatccgacgacgttactcaaacacgatattcatggagcccccgtttatggatctattcaagatgaaatcgtagcagcgtattcattgtttaggatacaagatctttgtttagatgaagtattgaacatcttggggaaatatggaagagagttcgatcctaaaggtaaatgtaaattcagcggtaaagatatctatacttacttgataggtgaaaagattaattatccgggtctcttaaaggatggtgaaattattgcaaacgacgtagatagtaattttgttgtggctatgaggcatctgtcattggctggactcttatccgatcataagtcgaacgtggaaggtatcaactttattatcaagtcatcttatgtttttaagagatatctatctatttacggttttggggtgacattcaaagatctgagaccaaattcgacgttcactaataaattggaggccatcaacgtagaaaaaatagaacttatcaaagaagcatacgccaaatatctcaacgatgtaagagacgggaaaatagttccattatctaaagctttagaggcggactatgtggaatccatgttatccaacttgacaaatcttaatatccgagagatagaagaacatatgagacaaacgctgatagatgatccagataataacctcctgaaaatggccaaagcgggttataaagtaaatcctacagaactaatgtatattctaggtacgtatggacaacaaaggattgatggtgaaccagcagagactcgagtattgggtagagtcttaccttactatcttccagactctaaggatccagaaggaagaggttacattcttaattctttaacaaaaggattaacgggttctcaatattacttttcgatgctggttgccagatctcaatctactgatatcgtctgtgaaacatcacgtaccggaacactggctagaaaaatcattaaaaagatggaggatatggtggtcgacggatacggacaagtagttataggtaatacgctcatcaagtacgccgccaattataccaaaattctaggctcagtatgtaaacctgtagatcttatctatccagatgagtccatgacttggtatttggaaattagtgctctgtggaataaaataaaacagggattcgtttactctcagaaacagaaacttgcaaagaagacattggcgccgtttaatttcctagtattcgtcaaacccaccactgaggataatgctattaaggttaaggatctgtacgatatgattcataacgtcattgatgatgtgagagagaaatacttctttacggtatctaatatagattttatggagtatatattcttgacgcatcttaatccttctagaattagaattacaaaagaaacggctatcactatctttgaaaagttctatgaaaaactcaattatactctaggtggtggaactcctattggaattatttctgcacaggtattgtctgagaagtttacacaacaagccctgtccagttttcacactactgaaaaaagtggtgccgtcaaacaaaaacttggtttcaacgagtttaataacttgactaatttgagtaagaataagaccgaaattatcactctggtatccgatgatatctctaaacttcaatctgttaagattaatttcgaatttgtatgtttgggagaattaaatccagacatcactcttcgaaaagaaacagataaatatgtagtagatataatagttaatagattatacatcaagagagcagaaataaccgaattagttgtcgaatatatgattgaacgatttatctcctttagcgtcattgtaaaggaatggggtatggagacattcattgaggacgaggataatattagatttactgtctacctaaatttcgttgaaccggaagaattgaatcttagtaagtttatgatggttcttccgggtgccgccaacaagggcaagattagtaaattcaagattcctatctctgattatacgggttatgacgacttcaatcaaacaaaaaagctcaataagatgactgtagaactcatgaatctaaaagaattgggttctttcgatttggaaaacgtcaacgtgtatcctggagtatggaatacatacgatatcttcggtatcgaggccgctcgtgaatacttgtgcgaagccatgttaaacacctatggagaagggttcgattatctgtatcagccttgtgatcttctcgctagtttactatgtgctagttacgaaccagaatcagttaataaattcaagttcggtgcagctagtactcttaagagagctacgttcggagacaataaagcattgttaaacgcggctcttcataaaaagtcagaacctattaacgataatagtagctgccacttttttagcaaggtccctaatataggaactggatattacaaatactttatcgacttgggtcttctcatgagaatggaaaggaaactatctgataagatatcttctcaaaagatcaaggaaatggaagaaacagaagacttttaattcttatcaataacatatttttctatgatctgtcttttaaacgatggattttccacaaatgcgcctctcaagtccctcatagaatgatacacgtataaaaaatatagcataggcaatgactccttatttttagacattagatatgccaaaatcatagccccgcttctatttactcccgcagcacaatgaaccaacacgggctcgtttcgttgatcacatttagataaaaaggcggttacgtcgtcaaaatatttactaatatcggtagttgtatcatctaccaacggtatatgaataatattaatattagagttaggtaatgtatatttatccatcgtcaaatttaaaacatatttgaacttaacttcagatgatggtgcatccatagcatttttataatttcccaaatacacattattggttacccttgtcattatagtgggagatttggctttgtgcatatctccagttgaacgtagtagtaagtatttatacaaacttttcttatccatttataacgtacaaatggataaaactactttatcggtaaacgcgtgtaatttagaatacgttagagaaaaggctatagtaggcgtacaagcagccaaaacatcaacacttatattctttgttattatattggcaattagtgcgctattactctggtttcagacgtctgataatccagtctttaatgaattaacgagatatatgcgaattaaaaatacggttaacgattggaaatcattaacggatagcaaaacaaaattagaaagtgatagaggtagacttctagccgctggtaaggatgatatattcgacttcaaatgtgtggatttcggcgcctattttatagctatgcgattggataagaaaacatatctgccgcaagctattaggcgaggtactggagacgcgtggatggttaaaaaggcggcaaaggtcgatccatctgctcaacaattttgtcagtatttgataaaacacaagtctaataatgttattacttgtggtaatgagatgttaaatgaattaggttatagcggttattttatgtcaccgcattggtgttccgattttagtaatatggaatagtgttagataaatgcggtaacgaatgttcctgtaaggaaccataacagtttagatttaacgttaaagatgagcataaacataataaacaaaattacaatcaaacctataacattaatatcaaacaatccaaaaaatgaaatcagtggagtagtaaacgcgtacataactcctggataacgtttagcagctgccgttcctattctagaccaaaaattcggtttcatgttttcgaagcggtgttctgcaacaagtcggggatcgtgttctacatatttggcggcgttatccagtatctgcctattgatcttcatttcgttttcgattctggctatttcaaaataaaatcccgatgatagacctccagactttataatttcatctacgatgttcagcgccgtagtaactctaataatataggctgataagctaacatcataccctcctgtatatgtgaatatggcatgatttttgtccattacaagctcggttttaactttattgcctgtaataatttctctcatctgtaggatatctatttttttgtcatgcattgccttcaagacgggacgaagaaacgtaatatcctcaataacgttatcgttttctacaataactacatattctacctttttattttctaactcggtaaaaaaattagaatcccatagggctaaatgtctagcgatatttcttttcgtttcctctgtacacatagtgttacaaaaccctgaaaagaagtgagtatacttgtcatcatttctaatgtttcctccagtccactgtataaacgcataatccttgtaatgatctggatcatccttgactaccacaacatttcttttttctggcataacttcgttgtcctttacatcatcgaacttctgatcattaatatgctcatgaacattaggaaatgtttctgatggaggtctatcaataactggcacaacaataacaggagttttcaccgccgccatttagttattgaaattaatcatatacaactctttaatacgagttatattttcgtctatccattgtttcacatttacatatttcgacaaaaagatataaaatgcgtattccaatgcttctctgtttaatgaattactaaaatatacaaacacgtcactgtctggcaataaatgatatcttagaatattgtaacaatttattttgtattgcacatgttcgtgatctatgagttcttcttcgaatggcataggatctccgaatctgaaaacgtataaataggagttagaataataatatttgagagtattggtaatatataaactctttagcggtataattagtttttttctctcaatttctatttttagatgtgatggaaaaatgactaattttgtagcattagtatcatgaactctaatcaaaatcttaatatcttcgtcacacgttagctctttgaagtttttaagagatgcatcagttggttctacagatggagtaggtgcaacaattttttgttctacacatgtatgtactggagccattgttttaactataatggtgcttgtatcgaaaaactttaatgcagatagcggaagctcttcgccgcgactttctacatcgtaattgggttctaacgccgatctctgaatggatactagttttctaagttctaatgtgattctctgaaaatgtaaatccaattcctccggcattatagatgtgtatacatcggtaaataaaactatagtatccaacgatcccttctcgcaaattctagtcttaaccaaaaaatcgtatataaccacggagatggcgtatttaagagtggattcttctaccgttttgttcttggatgtcatataggaaactataaagtccgcactactgttaagaatgattactaacgcaactatatagttcaaattaagcattttggaaacataaaataactctgtagacgatacttgactttcgaataagtttgcagacaaacgaagaaagaacagacctctcttaatttcagaagaaaactttttttcgtattcctgacgtctagagtttatatcaataagaaagttaagaattagtcggttaatgttgtatttcattacccaagtttgagatttcataatattatcaaaagacatgataatattaaagataaagcgctgactatgaacgaaatagctatatggttcgctcaagaatatagtcttgttaaacgtggaaacgataactgtatttttaatcacgtcagcggcatctaaattaaatataggtatatttattccacacactctacaatatgccacaccatcttcataataaataaattcgttagcaaaattattaattttagtgaaatagttagcgtcaactttcatagcttccttcaatctaatttgatgctcacacggtgcgaattccactctaacatcccttttccatgcctcaggttcatcgatctctataatatctagtttcttgcgtttcacaaacacgggctcgtctctcgcgatgagatctgtatagtaactatgtaaatgataactagatagaaagatgtagctatatagatgacgatcctttaagagaggtataataactttaccccaatcagataaactattgttatggtcttcggaaaaagaatttttataaatttttccagtattttccaaatatacgtacttgacatctaaaaaatccttaatgataataggaatggataatccgtctattttataaagaaatacatatcgcacattatacttttttttggaaatgggaataccgatgtgtctacataaatatgcaaagtctaaatattttttagagaatcttagttggtccaaattcttttccaagtacggtaatagatttttcatattgaacggtatcttcttaatctctggttctagttccgcattaaatgatgaaactaagtcactatttttataactaacgattacatcacctctaacatcatcatttaccagaatactgatcttcttttgtcgtaaatacatgtctaatgtgttaaaaaaaagatcatacaagttatacgtcatttcatctgtggtattcttgtcattgaaggataaactcgtactaatctcttctttaacagcctgttcaaatttatatcctatatacgaaaaaatagcaaccagtgtttgatcatccgcgtcaatattctgttctatcgtagtgtataacaatcgtatatcttcttctgtgatagtcgatacgttataaaggttgataacgaaaatatttttatttcgtgaaataaagtcatcgtaggattttggacttatattcgcgtctagtagatatgcttttatttttggaatgatctcaattagaatagtctctttagagtccatttaaagttacaaacaactaggaaattggtttatgatgtataatttttttagtttttatagattctttattctatacttaaaaaatgaaaataaatacaaaggttcttgagggttgtgttaaattgaaagcgagaaataatcataaattatttcattatcgcgatatccgttaagtttgtatcgtaatggcgtggtcaattacaaataaagcggatactagtagcttcacaaagatggctgaaatcagagctcatctaaaaaatagcgctgaaaataaagataaaaacgaggatattttcccggaagatgtaataattccatctactaagcccaaaaccaaacgagccactactcctcgtaaaccagcggctactaaaagatcaaccaaaaaggaggaagtggaagaagaagtagttatagaggaatatcatcaaacaactgaaaaaaattctccatctcctggagtcagcgacattgtagaaagcgtggccgctgtagagctcgatgatagcgacggggatgatgaacctatggtacaagttgaagctggtaaagtaaatcatagtgctagaagcgatctttctgacctaaaggtggctaccgacaatatcgttaaagatcttaagaaaattattactagaatctctgcagtatcgacggttctagaggatgttcaagcagctggtatctctagacaatttacttctatgactaaagctattacaacactatctgatctagtcaccgagggaaaatctaaagttgttcgtaaaaaagttaaaacttgtaagaagtaaatgcgtgcacttttttataaagatggtaaactctttaccgataataattttttaaatcctgtatcagacgataatccagcgtatgaggttttgcaacatgttaaaattcctactcatttaacagatgtagtagtatatgaacaaacgtgggaggaggcgttaactagattaatttttgtgggaagcgattcaaaaggacgtagacaatacttttacggaaaaatgcatgtacagaatcgcaacgctaaaagagatcgtatttttgttagagtatataacgttatgaaacgaattaattgttttataaacaaaaatataaagaaatcgtccacagattccaattatcagttggcggtttttatgttaatggaaactatgttttttattagatttggtaaaatgaaatatcttaaggagaatgaaacagtagggttattaacactaaaaaataaacacatagaaataagtcccgatgaaatagttatcaagtttgtaggaaaggacaaagtttcacatgaatttgttgttcataagtctaatagactatataagccgctattgaaactgacggatgattctagtcccgaagaatttctgttcaacaaactaagtgaacgaaaggtatacgaatgtatcaaacagtttggtattagaatcaaggatctccgaacgtatggagtcaattatacgtttttatataatttttggacaaatgtaaagtccatatctcctcttccatcaccaaaaaagttaatagcgttaactatcaaacaaactgctgaagtggtaggtcatactccatcaatttcaaaaagagcttacatggcaacgactattttagaaatggtaaaggataaaaattttttagatgtagtatctaaaactacgttcgatgaattcctatctatagtcgtagatcacgttaaatcatctacggatggatgatatagatctttacacaaataattacaagaccgataaatggaaatggataagcgtatgaaatctctcgcaatgacagctttcttcggagagctaaacacattagatattatggcattgataatgtctatatttaaacgccatccaaacaataccattttttcagtggataaggatggtcagtttatgattgatttcgaatacgataattataaggcttctcaatatttggatctgaccctcactccgatatctggagatgaatgcaagactcacgcatcgagtatagccgaacaattggcgtgtgtggatattattaaagaggatattagcgaatatatcaaaactactccccgtcttaaacgatttataaaaaaataccgcaatagatcagatactcgtatcagtcgagatacagaaaagcttaaaatagctctagctaaaggcatagattacgaatatataaaagacgcttgttaataagtaaatgaaaaaaaactagtcgtttataataaaacacaatatggatgccaacatagtatcatcttctactattgcaacgtatatagacgctttagcaaagaatgcttcagaattagaacagaggtctaccgcatacgaaataaataatgaattggaactagtatttattaagccgccattaattactttgacaaatgtagtgaatatctctacgattcaggaatcgtttattcgatttaccgttactaataaggaaggtgtcaaaattagaactaagattccattatctaaggtacatggtctagatgtaaaaaatgtacagttagtagatgctatagataacatagtttgggaaaagaaatcattagtgacggaaaatcgtcttcacaaagaatgcttgttgagactatcgacagaggaacgtcatatatttttggattacaagaaatatggatcctctatccgactagaattagtcaatcttattcaagcaaaaacaaaaaactttacgatagactttaagctaaaatattttctaggatccggtgcccaatctaaaagttctttgttgcacgctattaatcatccaaagtcaaggcctaatacatctctggaaatagaattcacacctagagacaatgaaaaagttccatatgatgaactaataaaggaattgacgactctatcacgtcatatatttatggcttctccagagaatgtaattctttctccgcctattaacgcacctataaagacttttatgttgcctaaacaagatatagtaggtctggatctggaaaatctatatgccgtaactaagactgacggcattcctataactatcagagttacatcaaacgggttgtattgttattttacacatcttgggtatattattagatatccagttaagagaataatagattccgaagtagtagtctttggtgaggcagttaaggataagaactggaccgtatatctcattaagctaatagagcctgtgaatgcaatcaatgatagactagaagaaagtaagtatgttgaatctaaactagtggatatttgtgatcggatagtattcaagtcaaagaaatatgaaggtccgtttactacaactagtgaagtcgtcgatatgttatctacatatttaccaaagcaaccagaaggtgttattctgttctattcaaagggacctaaatctaacattgattttaaaattaaaaaggaaaatactatagaccaaactgcaaatgtagtatttaggtacatgtccagtgaaccaattatctttggagaatcgtctatctttgtagagtataagaaatttagcaacgataaaggctttcctaaagaatatggttctggtaagattgtgttatataacggcgttaattatctaaataatatctattgtttggaatatattaatacacataatgaagtgggtattaagtccgtggttgtacctattaagtttatagcagaattcttagttaatggagaaatacttaaacctagaatcgataaaaccatgaaatatattaactcagaagattattatggaaatcaacataatatcatagtcgaacatttaagagatcaaagcatcaaaataggagatatctttaacgaggataaactatcggatgtgggacatcaatacgccaataatgataaatttagattaaatccagaagttagttattttacgaataaacgaactagaggaccgttgggaattttatcaaactacgtcaagactcttcttatttctatgtattgttccaaaacatttttagacgattccaacaaacgaaaggtattggcgattgattttggaaacggtgctgacctggaaaaatacttttatggagagattgcgttattggtagcgacggatccggatgctgatgctatagctagaggaaatgaaagatacaacaaattaaactctggaattaaaaccaagtactacaaatttgactacattcaggaaactattcgatccgatacatttgtctctagtgtcagagaagtattctattttggaaagtttaatatcatcgactggcagtttgctatccattattcttttcatccgagacattatgctaccgtcatgaataacttatccgaactaactgcttctggaggcaaggtattaatcactaccatggacggagacaaattatcaaaattaacagataaaaagacttttataattcataagaatttacctagtagcgaaaactatatgtctgtagaaaaaatagctgatgatagaatagtggtatataatccatcaacaatgtctactccaatgactgaatacattatcaaaaagaacgatatagtcagagtgtttaacgaatacggatttgttcttgtagataacgttgatttcgctacaattatagaacgaagtaaaaagtttattaatggcgcatctacaatggaagatagaccgtctacaaaaaactttttcgaactaaatagaggagccattaaatgtgaaggtttagatgtcgaagacttacttagttactatgttgtttatgtcttttctaagcggtaaataataatatggtatgggttctgatatccccgttctaaatgcattaaataattccaatagagcgatttttgttcctataggaccttccaactgtggatactctgtattgttaatagatatattaatacttttgtcgggtaacagaggttctacgtcttctaaaaataaaagtttgataacatctggcctgttcataaataaaaacttggcgattctatatatactcttattatcaaatctagccattgtcttatagatgtgagctactgtaggtgtaccatttgattttctttctaatactatatatttctctcgaagaagttcttgcacatcatctgggaataaaatactactgttgagtaaatcagttattttttttatatcgatattgatggacatttttatagttaaggataataagtatcccaaagtcgataacgacgataacgaagtatttatacttttaggaaatcacaatgactttatcagatcaaaattaacaaaattaaaggagcatgtatttttttctgaatatattgtgactccagatacatatggatctttatgcgtcgaattaaatgggtctagttttcagcacggtggtagatatatagaggtggaggaatttatagatgctggaagacaagttagatggtgttctacatccaatcatatatctgaagatatacccgaagatatacacactgataaatttgtcatttatgatatatacacttttgacgctttcaagaataaacgattggtattcgtacaggtacctccgtcgttaggagatgatagctatttgactaatccgttattgtctccgtattatcgtaattcagtagccagacaaatggtcaatgatatgatttttaatcaagattcatttttaaaatatttattagaacatctgattagaagccactatagagtttctaaacatataacaatagttagatacaaggataccgaagaattaaatctaacgagaatatgttataatagagataagtttaaggcgtttgtattcgcttggtttaacggcgtttcggaaaatgaaaaggtactagatacgtataaaaaggtatctaatttgatataatgaattcagtgactgtatcacacgcgccatatactattacttatcacgatgattgggaaccagtaatgagtcaattggtagagttttataacgaagtagccagttggctgctacgagacgagacgtcgcctattcctgataagttctttatacagttgaaacaaccgcttagaaataaacgagtatgtgtgtgcggtatagatccgtatccgaaagatggaactggtgtaccgttcgaatcaccaaattttacaaaaaaatcaattaaggagatagcttcatctatatctagattaaccggagtaattgattataaaggttataaccttaatataatagacggggttataccctggaattattacttaagttgtaaattaggagaaacaaaaagtcacgcgatctactgggataagatttccaagttactgctgcagcatataactaaacacgttagtgttctttattgtttgggtaaaacagatttctcgaatatacgggcaaagttagaatccccggtaactaccatagtgggatatcatccagcggctagagaccgtcaattcgagaaagatcgatcatttgaaattatcaacgttttactggaattagacaacaaggtacctataaattgggctcaagggtttatttattaatgctttagtgaaattttaacttgtgttctaaatggatgcggctattagaggtaatgatgttatctttgttcttaagactataggtgtcccgtcagcgtgcagacaaaatgaagatccaagatttgtagaagcatttaaatgcgacgagttagaaagatatattgagaataatccagaatgtacactattcgaaagtcttagggatgaggaagcatactctatagtcagaattttcatggatgtagatttagacgcgtgtctagacgaaatagattatttaacggctattcaagattttattatcgaggtgtcaaactgtgtagctagattcgcgtttacagaatgcggcgccattcatgaaaatgtaataaaatccatgagatctaatttttcattgactaagtctacaaatagagataaaacaagttttcatattatctttttagacacgtataccactatggatacattgatagctatgaaacgaacactattagaattaagtagatcatctgaaaatccactaacaagatcgatagacactgccgtatataggagaaaaacaactcttcgggttgtaggtactaggaaaaatccaaattgcgacactattcatgtaatgcaaccacctcatgataatatagaagattacctattcacttacgtggatatgaacaacaatagttattacttttctctacaacgacgattggaggatttagttcctgataagttatgggaaccagggtttatttcattcgaagacgctataaaaagagtttcaaaaatattcattaattctataataaactttaatgatctcgatgaaaataattttacaacggtaccactggtcatagattacgtaacaccttgtgcattatgtaaaaaacgatcgcataaacatccgcatcaactatcgttggaaaatggtgctattagaatttacaaaactggtaatccacatagttgtaaagttaaaattgttccgttggatggtaataaactgtttaatattgcacaaagaattttagacactaactctgttttattaaccgaacgaggagaccatatagtttggattaataattcatggaaatttaacagcgaagaacccttgataacaaaactaattttgtcaataagacatcaactacctaaggaatattcaagcgaattactctgtccaagaaaacgaaagactgtagaagctaacatacgagacatgttagtagattcagtggagaccgatacctatccggataaacttccgtttaaaaatggtgtattggacctggtagacggaatgttttactctggagatgatgctaaaaaatatatgtgtactgtatcaaccggatttaaatttgacgatacaaagttcgtcgaagacagtccagaaatggaagagttaatgaatatcattaacgatatccaaccattaacggatgaaaataagaaaaatagagagctatatgaaaaaacattatctagttgtttatgcggtgctaccaaaggatgtttaacattcttttttggagaaactgcaactggaaagtcgacaaccaaacgtttgttaaagtctgctatcggtgacctgtttgttgagacgggtcaaacaattttaacagatgtattggataaaggacctaatccatttatcgctaacatgcatttgaaaagatctgtattctgtagcgaactacctgattttgcatgtagtgggtcaaagaaaatcagatctgataatattaaaaagttgacagaaccttgtgtcattggaagaccgtgtttctccaataaaattaataatagaaaccatgcgacaatcattatcgatactaattacaaacctgtttttgataggatagataacgcattaatgagaagaattgccgtcgtgcgattcagaacacacttttctcaaccttctggtagagaggctgctgaaaataatgacgcgtacgataaagtcaaactattagacgaggggttagatggtaaaatacaaaataatagatatagattcgcatttctatacttgttggtgaaatggtacagaaaatatcatgttcctattatgaaactatatcctacacccgaagagattcctgactttgcattctatctcaaaataggtactctgttggtatctagctctgtaaagcatattccattaatgacggacctctccaaaaagggatatatattgtacgataatgtggtcactcttccgttgactactttccaacagaaaatatccaagtattttaattctagactatttggacacgatatagagagcttcatcaatagacataagaaatttgccaatgttagtgatgaatatctgcaatatatattcatagaggatatttcatctccgtaaatatatgctcatatatttatagaagatatcacatatctaaatgaataccggaattatagatttatttgataatcatgttgatagtataccaactatattacctcatcagttagctactctagattatctagttagaactatcatagatgagaacagaagcgtgttattgttccatattatgggatcaggtaaaacaataatcgctttgttgttcgccttggtagcttccagatttaaaaaggtttacattctagtgccgaacatcaacatcttaaaaattttcaattataatatgggtgtagctatgaacttgtttaatgacgaattcatagctgagaatatctttattcattccacaacaagtttttattctcttaattataacgataacgtcattaattataacggattatctcgctacaataactctatttttatcgttgatgaggcacataatatctttgggaataatactggagaacttatgaccgtgataaaaaataaaaacaagattccttttctactattgtctggatctcccattactaacacacctaatactctgggtcatattatagatttaatgtccgaagagacgatagattttggtgaaattattagtcgtggtaagaaagtaattcagacacttcttaacgaacgcggtgtgaatgtacttaaggatttgcttaaaggaagaatatcatattacgaaatgcctgataaagatctaccaacgataagatatcacggacgtaagtttctagatactagagtagtatattgtcacatgtctaaacttcaagagagagattatatgattactagacgacagctatgttatcatgaaatgtttgataaaaatatgtataacgtgtcaatggcagtattgggacaacttaatctgatgaataatttagatactttatttcaggaacaggataaggaattgtacccaaatctgaaaataaataatggcgtgttatacggagaagaattggtaacgttaaacattagttccaaatttaaatactttattaatcggatacagacactcaacggaaaacattttatatacttttctaattctacatatggcggattggtaattaaatatatcatgctcagtaatggatattctgaatataatggttctcagggaactaatccacatatgataaacggcaaaccaaaaacatttgctatcgttactagtaaaatgaaatcgtctttagaggatctattagatgtgtataattctcctgaaaacgatgatggtagtcaattgatgtttttgttttcatcaaacattatgtccgaatcctatactctaaaagaggtaaggcatatttggtttatgactatcccagatactttttctcaatacaaccaaattcttggacgatctattagaaaattctcttacgccgatatttctgaaccagttaatgtatatcttttagccgccgtatattccgatttcaatgacgaagtgacgtcattaaacgattacacacaggatgaattaattaatgttttaccatttgacatcaaaaagctgttatatctaaaatttaagacgaaagaaacgaatagaatatactctattcttcaagagatgtctgaaacgtattctcttccaccacatccatcaattgtaaaagttttattgggagaattggtcagacaatttttttataataattctcgtattaagtataacgataccaagttacttaaaatggttacatcagttataaaaaataaagaagacgctaggaattacatagatgatattgtaaacggtcacttctttgtatcgaataaagtatttgataaatctcttttatacaaatacgaaaacgatattattacagtaccgtttagactttcctacgaaccatttgtttggggagttaactttcgtaaagaatataacgtggtatcttctccataaaactgatgagatatataaagaaataaatgtcgagctttgttaccaatggataccttccagttacattggagccacacgagctgacgttagacataaaaactaatattaggaatgccgtatataagacgtatctccatagagaaattagtggtaaaatggccaagaaaatagaaattcgtgaagacgtggaattacctctcggcgaaatagttaataattctgtagttataaacgttccgtgtgtaataacctacgcgtattatcacgttggggatatagttagaggaacattaaacatcgaagatgaatcaaatgtaactattcaatgtggagatttaatctgtaaactaagtagagattcgggtactgtatcatttagcgattcaaagtactgcttttttcgaaatggtaatgcgtatgacaatggcagcgaagtcactgccgttctaatggaggctcaacaaggtatcgaatctagttttgtttttctcgcgaatatcgtcgactcataagaaagagaatagcggtaagtataaacacgaatactatggcaataattgcgaatgttttattcccttcgatatatttttgataatatgaaaaacatgtctctctcaaatcggacaaccatctcataaaatagttatctcgcgctggcgaggtggttgccgctcgtataatctccccagaataatatacttgcgtgtcgtcgttcaatttatacggatttctatagttctctgttatataatgcggttttccatcatgattagacgacgacaatagtgttctaaatttagatagttgatcagaatgaatgtttattggcgttggaaaaattatccatgctgcgtctgcagagtggttgatagttgttcctagatatgtaaaataatccaacgtactaggtagcaaattgtctagataaaatactgaatcaaacggcgcagacgtattagcggatctaatggaatccaattgattgactatcttttgaaaatatacatttttatgatccgatacttgtaagaatatagaaataatgataagtccatcatcgtgtttttttgcctcttcataagaactatattttttcttattccaatgaacaagattaatctctccagagtatttgtacacatctatcaagtgattggatccataatcgtcttcctttccccaatatatatgtagtgatgataacacatattcattggggagaaaccctccacttatatatcctcctttaaaattaatccttactagttttccagtgttctggatagtggttggtttcgactcattataatgtatgtctaacggcttcaatcgcgcgttagaaattgcttttttagtttctatattaataggagatagttgttgcggcatagtaaaaatgaaatgataactgtttaaaaatagctcttagtatgggaattacaatggatgaggaagtgatatttgaaactcctagagaattaatatctattaaacgaataaaagatattccaagatcaaaagacacgcatgtgtttgctgcgtgtataacaagtgacggatatccgttaataggagctagaagaacttcattcgcgttccaggcgatattatctcaacaaaattcagattctatctttagagtatccactaaactattacggtttatgtactacaatgaactaagagaaatctttagacggttgagaaaaggttctatcaacaatatcgatcctcactttgaagagttaatattattgggtggtaaactagataaaaaggaatctattaaagattgtttaagaagagaattaaaagaggaaagtgatgaacgtataacagtaaaagaatttggaaatgtaattctaaaacttacaacacgggataaattatttaataaagtatatataggttattgcatggcgtgttttattaatcaatcgttggaggatttatcgcatactagtatttacaatgtagaaattagaaagattaaatcattaaatgattgtattaacgacgataaatacgaatatctgtcttatatttataatatgctagttaatagtaaatgaacttttacagatctagtataattagtcagattattaagtataatagacgactagctaagtctattatttgcaaggatgactctcaaattattacactcacggcattcgttaaccaatgcctatggtgtcataaacgagtatccgtgtccgctattttattaactactgataacaaaatattagtatgtaacagacgagatagttttctctattctgaaataattagaactagaaacatgtttagaaagaaacgattatttctgaattattccaattatttgtccaaacaggaaagaagtatactatcgtcatttttttctctatatccagctactgctgataatgatagaatagacgctatttatccgggtggcatacccaaaaggggtgagaatgttccagagtgtctatccagggaaatcaaagaagaagttaatatagacaattcttttgtattcatagacactcggttttttattcatggtatcatagaagataccattatcaacaaattttttgaggtaattttctttgtcggaagaatatctctaacgagtgatcaaattattgatacctttaaaagtaatcatgaaatcaaggatctaatatttttagatccgaattcaggtaatggactccaatacgaaattgcaaaatatgctctagatactgcaaaacttaaatgttacggccatagaggatgttattatgaatcattaaaaaaattaactgaggatgattgattagaaaatataaattaatttaccatcgtgtatttttataacgggattgtccggcatatcatgtagatagttaccgtctacatcgtatactcgaccatctacgcctttaaatcctctatttattgacattaatctattagaattggaataccaaatattagtaccctcaattagtttattggtaatattttttttagacgatagatcgatggctcttgaaaccaaggttttccaaccggactcattgtcgatcggtgagaagtctttttcattagcatgaatccattctaatgatgtatgtttaaacactctaaacaattggacaaattcttttgatttgctttgaatgatttcaaataggtcttcgtctacagtaggcataccattagataatctagccattataaagtgcacgtttacatatctacgttctggaggagtaagaacgtgactattgagacgaatggctcttcctactatctgacgaagagacgcctcgttccatgtcatatctaaaatgaagatatcattaattgagaaaaaactaataccctcgcctccactagaagagaatacgcatgttttaatgcattctccgttagtgtttgattcttggttaaactcagccaccgccttgattctagtatcttttgttctagatgagaactctatattagagataccaaagactttgaaatatagtaataagatttctattcctgactgattaacaaatggttcaaagactagacatttaccatgggatgctaatattcccaaacatacatctataaatttgacgcttttctcttttaattcagtaaatagagagatatcagccgcactagcatcccctttcaatagttctccctttttaaaggtatttaatgcggatttagaaaactctctatctcttaatgaatttttaaaatcattatatagtgttgctatctcttgcgcgtattcgccgggatcacgattttgtctttcaggaaagctatcgaacgtaaacgtagtagccatacgtctcagaattctaaatgatgatataccagtttttatttctgcgagtttagccttttgataaatctcttcttgcttttttgacatattaacgtatcgcattaatactgttttcttagcgaatgatgcagacccttctacgttatcaaaaatagaaaactcgttattaactatgtacgaacataggcctcctagtttggagactaattctttttcatcgactagacgtttattctcaaatagtgattggtgttgtaaggatcctggtcgtagtaagttaaccaacatggtgaattcttgcacactattgacgataggtgtagccgataaacaaatcatcttatggttttttaatgcgatggtcttggataaaaaattatatactgaacgagtaggacggatcttaccatcttctttgattaatgatttagaaatgaagttatgacattcatcaataatgacgcatattctactcttggaattaatagttttgatattagtaaaaaatttatttctaaaattttgatcatcgtaattaataaaaatacaatccttcgttatctctggagcgtatctgagtatagtgttcatccaaggatcttctatcaaagcctttttcaccaataagataatagcccaattcgtataaatatccttaagatgtttgagaatatatacagtagtcattgttttaccgacacccgtttcatggaacaataaaagagaatgcatactgtctaatcctaagaaaactcttgctacaaaatgttgataatccttgaggcgtactacgtccgaccccatcatttcaacgggcatattagtagttctgcgtaaggcataatcgatataggccgcgtgtgatttactcatttatgagtgataagtaataactatgttttaaaaatcacagcagtagtttaactagtcttctctgatgtttgttttcgatactttttgaatcagaagtcatactagaataaagcaacgagtgaacgtaatagagagcttcgtatactctattcgaaaactctaagaacttattaatgaattccgtatccactggattgtttaaaatactaaattgaacactgttcacatccttccaagaagaagacttagtgacggacttaacatgagacataaataaatccaaattttttttacaaacatcactagccaccataatggcgctatctttcaaccagctatcgcttacgcattttagcagtctaacatttttaaagagactacaatatattctcatagtatcgattacacctctaccgaataaagttggaagtttaataatacaatatttttcgtttacaaaatcaaataatggtcgaaacacgtcgaaggttaacatcttataatcgctaatgtatagattgttttcagtgagatgattattagatttaatagcatctcgttcacgtttgaacagtttattgcgtgcgctgaggtcggcaactacggcgtccgctttagtactcctcccataatactttacgctattaatctttaaaatttcatagactttatctagatcgctttctggtaacatgatatcatgtgtaaaaagttttaacatgtcggtcggcattctatttagatcattaactctagaaatctgaagaaagtaattagctccgtattccagactaggtaatgggcttttacctagagacagattaagttctggcaatgtttcataaaatggaagaaggacatgcgttccctcccggatattttttacaatttcatccatttacaactctatagtttgttttcattattattagttattatctcccataatcttggtaatacttaccccttgatcgtaagataccttatacaggtcattacatacaactaccaattgtttttgtacataatagattggatggttgacatccatggtggaataaactactcgaacagatagtttatctttccccctagatacattggccgtaatagttgtcggcctaaagaatatctttggtgtaaagttaaaagttagggttcttgttccattattgctttttgtcagtagttcattataaattctcgagatgggtccgttctctgaatatagaacatcatttccaaatctaacttctagtctagaaataatatcggtcttattcttaaaatctattcccttgatgaagggatcgttaatgaacaaatccttggcctttgattcggctgatctattatctccgttatagacgttacgttgactagtccaaagacttacaggaatagatgtatcgatgatgttgatactatgtgatatgtgagcaaagattgttctcttagtggcatcactatatgttccagtaatggcggaaaactttttagaaatgttatatataaaagaattttttcgtgttccaaacattagcagattagtatgaagataaacactcatattatcaggaacattatcaatttttacatacacatcagcatcttgaatagaaacgataccatcttctggaacctcaacaatctcggcagactccggataaccagtcggtggaccatcgctaacaataactagatcatccaacaatctactcacatatgcatctatataatctttttcatcttgtgagtaccctggatacgaaataaatttattatccgtatttccataataaggtttagtataaacagagagcgatgttgccgcatgaacttcagttacagtcgccgttggttggtttatttgacctattactctcctaggtttctctataaacgatggtttaatttgtacattcttaaccatatatccaataaagctcaattcaggaacataaacaaattctttgttgaacgtttcaaagtcgaacgaagagtcacgaataacgatatcggatactggattgaaggttaccgttacggtaatttttgaatcggatagtttaagactgctgaatgtatcttccacatcaaacggagttttaatataaacgtatactgtagatggttctttaatagtgtcattaggagttaggccaatagaaatatcattaagttcactagaatatccagagtgtttcaaagcaattgtattattgatacaattattatataattcttcgccctcaatttcccaaataacaccgttacacgaagagatagatacgtgattaatacatttatatccaacatatggtacgtaaccgaatcttcccatacctttaacttctggaagttccaaactcagaaccaaatgattaagcgcagtaatatactgatccctaatttcgaagctagcgatagcctgattgtctggaccatcgtttgtcataactccggatagagaaatatattgcggcatatataaagttggaatttgactatcgactgcgaagacattagaccgtttaatagagtcatccccaccgatcaaagaattaatgatagtattattcattttctatttaaaatggaaaaagcttacaataaactccgtagagaaatatctataatttgtgagttttccttaaagtaacagcttccgtaaacgccgtctttatctcttagtaagtttattgtatttataaccttttccttatcttcatagaatactaaaggcaacaaagaaatttttggttcttctctaagagctacgtgagacttaaccatagaagccaacgaatccctacatattttagaacagaaataccctacttcaccacccttgtatgtctcaatactaataggtctaaaaaccaaatcttgattacaaaaccaacacttatcaattacactatttgtcttaatagacacatctgccatagatttataatactttggtagtatacaagcgagtgcttcttctttagcgggcttaaagactgctttaggtgctgaaataaccacatctggaaggcttactcgcttagccatttaattacggaactatttttttatacttctaatgagcaagtagaaaacctctcatctacaaaaacatactcgtgtccataatcctctaccatagttacacgttttttagatctcatatgtgctaaaaagttttcccatactaattggttactattatttttcgtataatttttaacagtttgaggttttagatttttagttacagaagtgatatcgaatattttatccaaaaagaatgaataattaattgtcttagaaggagtgttttcttggcaaaagaataccaagtgcttaaatatttctactacttcattaatcttttctgtactcagattcagtttctcatcttttacttgattgattatttcaaagactaacttataatcctttttatttattctctcgttagccttaagaaaactagatacaaaatttgcatctacatcatccgtggatatttgatttttttccatgatatccaagagttccgagataatttctccagaacattgatgagacaataatctccgcaatacatttctcaaatgaataagtttattagacacgtggaagtttgactttttttgtacctttgtacatttttgaaataccgactcgcaaaaaatacaatattcatatccttgttcagatactataccgttgtgtctacaaccgctacataatcgtagattcatgttaacactctacgtatctcgtcgtccaatattttatataaaaacattttatttctagacgttgccagaaaatcctgtaatacttttagttttttgggctgtgaataaagtatcgccctaatatggttaccgtcctccgccaatatagtagttaaattatccgcacatgcaaaagaacaccgcttaggcggattcagtacaatgttatatttttcgtaccaactcatttaaatatcataatctaaaatagttctgtaatatgtctagcgctaatatattgatcataatcctgtgcataaattaagatacaacaatgtctcgaaatcatcgacatggcttcttccatagttagaagatcgtcgtcaaagttagcaacgtgattcatcaacatttgctgttttgaggcagcaaatactgaaccgtcgccattcaaccattcataaaaaccatcgtctgaatccattgataatttcttgtactggtttttgagagctcgcatcaatctagcatttctagctcccggattgaaaacagaaagaggatcgtacatccagggtccattttctgtaaatagaatcgtataatgtcccttcaagaagatatcagacgatccacaatcaaagaattggtctccgagtttgtaacaaactgcggactttaacctatacatgataccgtttagcataatttctggtgatacgtcaatcggagtatcatctattagagatctaaagccggtgtaacattctccaccaaacatattcttattctgacgtcgttctacataaaacatcattgctccattaacgataacaggggaatgaacagcactacccatcacattagttcccaatggatcaatgtgtgtaactccagaacatcttccatagcctatgttaggaggagcgaacaccactcttccactattgccatcgaatgccatagaataaatatccttggaattgatagaaatcggactgtcggatgttgtgatcatcttcataggattaacaacgatgtatggtgccgcctgaagtttcatatcgtaactgatgccgttcataggtctagccacagaaaccaacgtaggtctaaatccaactatagacaaaatagaagccaatatctgttcctcatctgtcataacttgagagcatccagtatgaataatcttcattagatggggatctaccgcatcatcatcgttacaataaaaaattcccattctaatgttcataattgcttttctaatcatggtatgcatgtttgctctctgaatctctgtggaaattagatctgatacacctgtaatcactatcggattatcctccgtaagacgattaaccaacaacatataattataagactttacttttctaaattcataaagttgctggattaggctataggtgtctccatgtacatacgcgttctcgagcgcaggaagtttaataccgaatagtgccatcagaataggatgaatatagtaattagtttctggttttctataaataaaagacaaatcttgtgaactagacatatcggtaaaatgcatggattggaatcgtgtagtcgacagaagaatatgatgattagatggagagtatattttatctaactctttgagttggtcaccgattctaggactagctcgagaatgaataagtactaaaggatgagtacatttcacagaaacactagcattgttcaatgtgctctttacatgggtaaggagttgaaatagctcgtttctatttgttctgacaatatttagtttattcataatgttaagcatatcctgaatagtaaagttagatgtgtcatacttgttagtagttagatatttagcaattgcattcccatcatttctcaatctcgtactccaatcatgcgtggatgctacttcgtcgatggaaaccatacaatcctttttgataggctgttgagattgattatttcctgcacgtttaggtttggtacgttgatttctagcccctgcggatataaagtcatcgtctacaatttgggacaatgaattgcatacactacaagacaaagatttatcagaagtgtgaatatgatcttcatctaccaaagaaagagtttgattagtataactagattttagtcctgcgttagatgttaaaaaaacatcgctattgaccacggcttccattatttatattcgtagtttttactcgaaagcgtgattttaatatccaatcttattacttttggaatcgttcaaaacctttgactagttgtagaatttgatctattgccctacgcgtatactcccttgcatcatatacgttcgtcaccagatcgtttgtttcggcctgaagttggtgcatatctttttcaacactcgacatgagatccttaagggccatatcgtctagattttgttgagatgctgctcctggatttggattttgttgtgctgttgtacatactgtaccaccagtaggtgtaggagtacatacagtggccacaataggaggttgaggaggtgtaaccgttggagtagtacaagaaatatttccatccgattgttgtgtacatgtagttgttggtaacgtctgagaaggttgggtagatggcggtgtcgtcgtcttttgatctttattaaatttagagataatatcctgaacagcattgctcggcgtcaacgctggaaggagtgaactcgccggcgcatcagtatctgcagacagccaatcaaaaagattagacatatcagatgatgtattagtttgttgtcgtggttttggtgtaggagcagtactactaggtagaagaataggagccgatgtaggtgtcggaaccggctgtggagttatatgaatagttggttgtagcggttggataggctgtctgctggcggccatcatattatctctagctagttgttctcgcaactgtctttgataatacgactcttgagactttagtcctatttcaatcgcttcatcctttttcgtatccggatccttttcttcagaataatagattgacgactttggtgtagaggattctgccagcccctgtgagaacttgttaaagaagtccatttaaggctttaaaattgaattgcgattataagattaaatggcagacacagacgatattatcgactatgaatccgatgatctcactgaatacgaggatgatgaagaagaggaagaagatggagagtcactagaaactagtgatatagatcccaaatcttcttataagattgtagaatcagcatccactcatatagaagatgcgcattccaatcttaaacatatagggaatcatatatctgctcttaaacgacgctatactagacgtataagtctatttgaaatagcgggtataatagcagaaagctataacttgcttcaacgaggaagattacctctagtttcagaattttctgacgaaacgatgaagcaaaatatgctacatgtaattatacaagagatagaggagggttcttgtcctatagtcatcgaaaagaacggagaattgttgtcggtaaacgattttgacaaagatggtctaaaattccatctagactatattatcaaaatttggaaacttcaaaaacgatattagaatttatacgaatatcgttctctaaatgtcacaatcaagtctcgcatgttcagcaatttattgtcgtactttatatcgtgttcattaacgatatcttgcaaaatagtaatgattctatcttccttcgatagatattcttcagagattattgtcttatattctttcttgttatcagatatgaatttgataagactttgaacattattgatacccgtctgtttaattttttctacagatattttagttttggcagattctatcgtatctgtcaatagacatccaacatcgacattcgacgtcaattgtctataaatcaacgtataaattttagaaataacattagcgaattgttgtgcattgatgtcgttattctgaaacagtatgattttaggtagcattttcttaacaaagagaacgtatttattgttactcagttgaacagatgatatatccagattactaacgcatctgattccgtataccaaactttcagaagaaatggtatacaattgtttgtattcattcaatgtctctttttcagaaattagtttagagtcgaatactgcaataattttcaagagatagttttcatcagataagattttatttagtgtagatatgataaaactattgttttgttggagaacttgatacgccgcgttctctgtagtcgacgctctcaaatgggaaacgatctccattatttttttggaatcggatactatatcttcggtatcttgacgcagtctagtatacatagagttaagagagattagagtttgtacattaagcaacatgtctctaaatgtggctacaaacttttccttttccacatcatctagtttattatataccgatttcacaacggcaccagatttaaggaaccagaatgaaaaactctgataactacaatatttcatcatagttacgattttatcatcttctatagttggtgtaatagcgcatacctttttctccaagactggaaccaacgtcataaaaatgtttaaatcaaaatccatatcaacatctgatgcgctaagaccagtctcgcgttcaagattatctttactaatggtgacgaactcatcgtatagaactctaagtttgtccattatttatttacagatttagttgtttaatttatttgtgctcttccagagttgggatagtatttttctaacgtcggtattatattattaggatctacgttcatatgtatcataatattaatcatccacgttttgataaatctatctttagcttctgaaataacgtatttaaacaaaggagaaaaatatttagctacggcatcagacgcaataacattttttgtaaatgtaacgtatttagacgacagatcttcgttaaaaagttttccatctatgtagaatccatcagttgttaacaccattcccgcgtcagattgaataggagtttgaatagtttgttttggaaatagatccttcaataacttatagttgggtgggaaaaaatcgattttatcactagactctttcttttttactatcattacctcatgaactatttcttgaatgagtatatgtattttctttcctatatcggacgcgttcattggaaaatataccatgtcgttaactataagaatatttttatcctcgtttacaaactgaataatatcagatgtagttcgtaaacgaactatatcatcaccagcacaacatctaactatatgatatccactagtttcctttagtcgtttattatcttgttccatattagcagtcattccatcatttaagaaggcgtcaaagataatagggagaaatgacattttggattctgttacaactttaccaaaattaaggatatacggacttactatctttttctcaacgtcaatttgatgaacacacgatgaaaatgtacttcgatgagattgatcatgtagaaaacaacaagggatacaatatttccgcatatcatgaaatatattaagaaatcccaccttattatatttccccaaaggatccatgcacgtaaacattatgccgttatcattaataaagacttctttctcatcggatctgtaaaagttgttactgatttttttcattccaggatctagataattaataatgatgggttttctattcttattctttgtattttggcatatcctagaccagtaaacagtttccactttggtaaaatcagcagacttttgaacgctattaaacatggcattaatggcaataactaaaaatgtaaaatatttttctatgttaggaatatggtttttcactttaatagatatatggtttttggccaaaatgatagatatttttttatccgaggatagtaaaatattattagtcgccgtctctataaaaatgaagctagtctcgatatccaattttattctagaattgataggagtcgccaaatgtaccttatacgttatatctcccttgatgcgttccatttgtgtatctatatcggacacaagatctgtaaatagttttacgttattaatcatcacggtatcgccgtcgctagataatgctaatgtaccatccaagtcccaaatggagagatttaactgttcatcgtttagaataaaatgattaccggtcatattaataaagtgttcatcgtatctagataacaacgacttataattaatgtccaagtcttgaactcgctgaatgatcttttttaacccagttagttttagattggtacgaaatatattgttaaactttgattctacagtaatgtccaaatctagttgtggaaatacttccatcaacattgtttcaaacttgataatattattatctacatcttcatacgatccaaattccggaatagatgtatcacatgctcttgccacccagataaccaaaaagtcacacgctccaggatatacattgtataaaaagctatcgtttttaagtagggtttttttctgcgtgtatacgaagggattaaaaatagtattatcaacgtaactatattccaaattattcttatgagaatagataataatatcgtccttaatatctaacaaatttcctaaatatccctttaattgagtcattcgaagcgtcaatagaatatgtctcttaactatttccggctgttgtatatttaaatgacttcgtaaaaaataatatatgggcgacttctcatctatgtaatcatatggagtgagatatagggctcgttctacctcctgccccttacccacctgtaataccaattgcggacttactatatatcgcatatttatatcgtggggtaaagtgaaaatctactaccgatgatgtaagtcttacaatgttcgaaccagtaccagatcttaatttggaggcctccgtagaactaggggaggtaaatatagatcaaacaacacctatgataaaggaaaatagcggttttatatcccgtagtagacgtctattcgcccatagatctaaggatgatgagagaaaactagcactacgattctttttacaaagactttattttttagatcatagagagattcattatttgttcagatgcgttgacgctgtaaaagacgtcactattaccaaaaaaaataacattatcgtggcgccttatatagcacttttaactatcgcatcaaaaggatgcaaacttacagaaacaatgattgaagcattctttccagaactatataatgaacatagtaagaaatttaaattcaactctcaagtatccatcatccaagaaaaactcggataccagtttggaaactatcacgtttatgattttgaaccgtattactctacagtagctctggctattcgagatgaacattcatctggcatttttaatatccgtcaagagagttatctggtaagttcattatctgaaataacatatagattttatctaattaatctaaaatctgatcttgttcaatggagtgctagtacgggcgctgtaattaatcaaatggtaaatactgtattgattacagtgtatgaaaagttacaactggtcatagaaaatgattcacaatttacatgttcattggctgtggaatcagaacttccaataaaattacttaaagatagaaatgaattatttacaaaattcatcaacgagttaaaaaagaccagttcattcaagataagcaaacgcgataaggatacgctactaaaatattttacttaggactggagttagaatttatagacgactcatttcgtttatcattattactaccatcattattagtattcttcttgttatcttgttcagaaatatacagcaatgctatgcctaatactaaatacattatcatgcttgcaatggctctaacaacgacgaaccaaaatgaatttggtcgtagcttttgttcacaaaaatacataaagaaatgtctacataaatctatggcgccattggctacttgaaatagcgccagtcctcctacagattttaatatagctgtataacatgacatttattcatcatcaaaagagacagagtcaccatctgtcatatttagattttttttcatgtgttcaaagtatcctctactcatttcattataatagtttatcatacttagaattttaggacggatcaatgagtaagacttgactagatcgtcagtagtaatttgtgcatcgtctattctgcatccgcttcgtcgaataatgtatagcatcgctttgagattctccatagctatcaagtctttatacaatgacatggaaatatctgtgaatactttatacttctccaacatcgatgccttaacatcatcgcctactttagcattgaaaatacgttctattgtgtagatggatgtagcaagatttttaaacaacaatgccatcttacacgatgattgcctcaagtctccaatcgtttgtttagaacgattagctacagagttcaacgcttggctgactagcatattattatctttagaaattgtattcttcaatgaagcgtttatcatatctgtgatttcgttagtcatattacagtctgactgggttgtaatgttatccaacatatcacctatggatacggtacacgtaccagcatttgtaataatcctatctaagatgttgtatggcattgcgcagaaaatatcttctcctgtaatatctccactctcgataaatctactcagattattcttaaatgccttattctctggagaaaagatatcagtgtccatcatttcattaatagtatacgcagaaaagataccacgagtatcaattctatccaagatacttatcggttccgagtcacagataatggtttcctctccttcgggagatcctgcatagaaatatctaggacaatagtttctatactgtctgtaactctgataatctctaaagtcactaactgataccatgaaattgagaagatcaaacgctgaagtaatcaatttttctgcctcgtttttactacaactagttttcatcaatgtagtgacgatgtattgtttagttactcttggtctaatactgatgatagagatattattacttcccataatggatcttctagtagtcaccttaaagcccattgatgcaaatagcagatagataaagtcttggtatgactcctttctaatatagtacggactacctttgtcacccaactttatacccacataagccataacaacctctttaatagccgtttcatgaggtttatcagccatgagcctgagtagttggaagaatctcatgaatcccgtctcagaaagtcctatatgcatgatagatttatctttcctgggaaactctcgtatagtcatagatgaaatactcttcaaagtttctgaaataagattagtaacagtcttacctccgactactctgggtaacaaacatactctaataggtgttttctctgcggagataatatcagaaaggatagagcaataagtagtattattgtgattataaagaccgaatacataacaggtagaatttataaacatcatgtcctgaaggtttttagacttgtattcctcgtaatccataccgtcccaaaacatggatttggtaactttgatagccgtagatctttgttccttcgccaacaggttaaagaaattaataaagaatttgttgtttctatttatgtccacaaattgcacgtttggaagcgtaactgttacgttcactgcagcattttgaggatcgcgagtatgaagtacgatgttattgtttactggtatatctggaaagaaatctaccagtctaggaataagagattgatatcgcatagaaatagtaaagtttataatctcatcatcgaagagcattttgttaccattgtaataaatatccactctgtcatatgtataaatgaagtactgttcaaacatgatgagatgtttatatgttggcatagtagtgagatcgacgtttggtaatggcaatgtattaagattaactccataatgtctagcagcatctgcgatgttataagtgtcgtcaaagcggggtcgatcttgtgctgttatatattgtctaacacctataagattatcaaaatcttgtctgcttaatacaccgttaacaatttttgccttgaattcttttattggtgcattaataacatccttatagaggatgttaaacaaataagtgttatcaaagttaagatctggatatttcttttctgctagaacatccattgagtcggagccatctggtttaatataaccaccgataaatctagctctgtattctgtatccgtcaatctaatattaagaaggtgttgagtgaaaggtggaagatcgtaaaagctgtgagtattaatgataggattagtttccgaactaatgttaattggggtattaataatatctatatttccagcgttaagtgtaacattaaacagttttaattcacgtgacgtggtatcaattaaataattaatgcccaatttggatatagcagcctgaagctcatcttgtttagttacggatcctaatgagttattaagcaatatatcgaacggatgaacgaaggttgttttaagttggtcacatactttgtaatctagacatagatgcggaagaacggtagaaactatacgaaataaatattcagagtcctctaattgatcaagagtaactattgacttaataggcatcatttatttagtattaaatgacgaccgtaccagtgacggatatacaaaacgatttaattacagagttttcagaagataattatccatctaacaaaaattatgaaataactcttcgtcaaatgtctattctaactcacgttaacaacgtggtagatagagaacataatgccgccgtagtgtcatctccagaggaaatatcctcacaacttaatgaagatctatttccagatgatgattcaccggccactattatcgaacgagtacaacctcatactactattattgacgatactccacctcctacttttcgtagagagttattaatatcggaacaacgtcaacaacgagaaaaaagatttaatattacagtatcgaaaaatgctgaagcaataatggaatctagatctatgataacttctatgccaacacaaacaccatccttgggagtagtttatgataaagataaaagaattcagatgttagaggatgaagtggttaatcttagaaatcaacgatctaatacaaaatcatctgataatttagataattttaccaaaatactatttggtaagactccgtataaatcaacagaagttaataagcgtatagccatcgttaattatgcaaatttgaacgggtcccccttatcagttgaggacttggatgtttgttcggaggatgaaatagatagaatctataaaacgattaaacaatatcacgaaagtagaaaacgaaaaattatcgtcactaacgtgattattattgtcataaacattatcgagcaggcattgctaaaactcggatttgaagaaatcaaaggactgagtaccgatatcacttcagaaattatcgatgtggagatcggagatgactgcgatgctgtagcatctaaactaggaatcggtaacagtccggttcttaatattgtattgtttatactcaagatattcgttaaacgaattaaaattatttaatttaatacattcccatatccagacaacaatcgtctggattaatctgttcctgtcgtctcataccggacgacatattaatctttttattagtaggcatctttttagatggtttctttttcccagcattaactgagtcgatacctagaagatcgtgattgatctctccgaccattccacgaacttctaattggccgtctctgacggtaccataaactattttaccagcattagtaacagcttggacaatctgaccatccattgcgttgaatgatgtagttgctgttgttctacgtttaggagcaccagaagtatttttggagcccttggaggctgatgtagaagaagacgaggattttgatttacatgtaatacattttgtactctttgattttgtatcacatgcgccggcagtcacatttgtttgagaattaagattattgttgcctcctttgacggctgcatctccaccgatttgcgctagtagatttttaagctgtggtgtaatcttattaactgtttcgatataatcatcgtaactgcttctaacggctaaattttttttatccgccatttagaagctaaaaatatttttatttatgcagaagatttaactagattatacaatgaactaatatgatccttttccagattatttacaaacttggtattttttggttctggaggaggcgaatttaaattcggacttggattcggattttgtgagttcttgatcttattatacatcgagtataggatggcgacggtaactgctacgcaaataccgatcaacaaaagaataccaatcatttattgacaataacttcactattgatcaagtatgcaatatatcatcttttcactaaataagtagtaataatgattcaacaatgtcgagatatatggacgataataatttagttcatggaaatatcgctatgattggtatgaatgactccgctaactctgtggggtgcgcagtgctttccccacatagaataaattagcattccgactgtgataataataccaagtataaacgccataatactcaatactttccatgtacgagtgggactggtagacttactaaagtcaataaaggcgaagatacacgaaagaatcaaaagaatgattccagcgattagcacgccggaaaaataatttccaatcataagcatcatgtccatttaactaataaaaattttaaatcgccgaatgaacaaagtggaatataaaccatataaaaacaatagtttgtactgcaaaaataatatctatttttgttttcgaagatatggtaaaattaaatagtagtacacagcatgttataactaacagcagcaacggctcgtaattacttatcatttactagacgaaaaggtggtgggatattttcttgctcaaataatacgaatatatcacccatccattttatgcgatgtttatatactctaatctttaatagatctatagacgacgggtttaccaacaatatagattttatcgattcatctaatttaaacccttccttaaacgtgaatgatctattatctggcataacgatgactctacctgatgaatcggacaatgtactgggccatgtagaataaattatcaacgaattatcgtctacgaacatttatatcatttgttttaattttaggacgcgaataaatggatataaaatagaaaataacagatattacaaccaatgttatggccgcgcccaaccaggtaggcagttttattttatcttttactacaggttctcctggatgtacgtcaccaacggcggacgtagttctagtacaattagacgtaagttctgcttgggaattttttaacgctaaagagttaacgttaatcgtgcacccaacgtatttacatctagttctttgaacatcttgattataatataaccattttctatctctagattcgtcggtgcactcatgtaaccaacataccctaggtcctaaatatttatctccggaattagattttggataattcgcgcaccaacaatttctatttcctttatgatcgttacaaaagacgtataatgccgtatccccaaaagtaaaataatcaggacgaataattctaataaactcagaacaatatctcgcatccatatgtttggagcaaatatcggaataagtagacatagccggtttccgttttgcacgtaaccattctaaacaattggggtttccaggatcgtttctacaaaatccagtcatgaaatcatcacaatgttctgtcttgtaattattattaaatatttttggacagtgtttggtatttgtcttagaacaacattttgccacgctatcactatcgcccaggagataatccttttttataaaatgacatcgttgcccggatgctatataatcagtggcgtgttttaaatccttaatatattcaggagttacctcgttctgataatagattaatgatccaggacgaaatttgaaagaactacatggttctccatgaattaatacatattgtttagcaaattcaggaactataaaactactacaatgatctatcgacataccatctatcaaacaaaacttgggtttaatttctcccggagatgtttcataatagtacgtataactttcttctgcaaacttaacagctctattatattcaggataattaaaacctaattccatatatttgtctcgtatatctgctattcctggtgctattttaattctattaagagtaacggctgcccccattcttaataatcgtcagtatttaaactgttaaatgttggtatatcaacatctaccttatttcccgcagtataaggtttgttgcaggtatactgttcaggaatggttacatttatacttcttctatagtcctgtctttcgatgttcatcacatatgcaaagaacagaataaacaaaataatgtaagaaataatattaaatatctgtgaattcgtaaatacattgattgccataataattacagcagctacaatacatacaatagacattcccacagtgttgccattacctccacgatacatttgagttactaagcaataggtaataactaagctagtaagaggcaatagaaaagatgagataaatatcatcaatatagagattagaggagggctatatagagccaagacgaacaaaatcaaaccgagtaacgttctaacatcattatttttgaagattcccaaataatcattcattcctccataatcgttttgcattatacctccatctttaggcataaacgattgctgctgttcctctgtaaataaatctttatcaagcactccagcacccgcagagaagtcgtcaagcatattgtaatatcttaaataactcatttatatattaaaaaatgtcactattaaagatggagtataatctttatgccgaactaaaaaaaatgacttgtggtcaacccctaagtctttttaacgaagacggggatttcgtagaagttgaaccgggatcatcctttaagtttctgatacctaagggattttacgcctctccttccgtaaagacgagtctagtattcgagacattaacaacgaccgataataaaatcactagtatcaatccaacaaatgcgccaaagttatatcctcttcaacgcaaagtcgtatctgaagtagtttctaatatgaggaaaatgatcgaatcaaaacgtcctctatacattactcttcacttggcgtgtggatttggtaagactattaccacgtgttatcttatggctacacacggtagaaaaaccgtcatttgcgtacccaataaaatgttaatacatcaatggaagacacaggtagaggcagtcggattggaacataagatatctatagatggagtaagtagtctattaaaggaactaaagactcaaagtccggatgtattaatagtagtcagtagacatctgacaaacgatgccttttgtaaatatatcaataagcattatgatttgttcatcttggatgaatcacatacgtataatctgatgaacaatacagcagttacaagatttttagcgtattatcctccgatgatgtgttattttttaactgctacacctagaccagctaaccgaatttattgtaacagtattattaatattgccaagttatccgatctaaaaaaaactatctatgcggtagatagtttttttgagccatattccacagacaatattagacatatggtaaaacgactagatggaccatctaataaatatcatatatatactgagaagttattatctgtagacgagcctagaaatcaacttattcttgataccctggtagaagaattcaagtcaggaactattaatcgaattttagttattactaaactacgtgaacatatggtattcttctacaaacgattattagattttttcggatcagaggttgtatttataggagacgcccaaaatagacgtactccagatatggtcaaatcaatcaaggaactaaatagatttatattcgtatccaccttattttattccggtactggtttagatattcctagtttggattcgttgttcatttgctcggcagtaatcaacaatatgcaaatagagcaattactagggagggtatgtcgagaaacagaactattagataggacggtatatgtatttcctaacacatccatcaaagaaataaagtacatgataggaaatttcatgcaacgaattattagtctgtctgtagataaactaggatttaaacaaaaaagttatcggaaacatcaagaatccgatcccacttctgtatgtacaacatcctccagagaagaacgtgtattaaatagaatatttaactcgcaaaatcgttaagaagtttaagcgacgatccgcatgctgcgcaggccagtgtattacccctcatagtattaatataatccaatgatacttttgtgatgtcggaaatcttaaccaatttagactgacaggcagaacacgtcatgcaatcatcatcgtcatcgataactgtagtcttgggcttctttttgcggctcttcattccggaacgcacattggtgctatccatttaggtagtaaaaaataagtcagaatatgccctatagcacgatcgtgcaaaacctggtatatcgtctctatctttatcacaatatagtgtatcgacatttttattattattgacctcgtttatcttggaacatggaatgggaacatttttgttatcaacggccatctttgccttaattccagatgttgtaaaattataactaaacagtctatcatcgacacaaatgaaattcttgtttagacgtttgtagtttacgtatgcggctcgttcgcgtctcattttttcagatattgcaggtactataatattaaaaataagaatgaaataacataggattaaaaataaagttatcatgacttctagcgctgatttaactaacttaaaagaattacttagtctgtacaaaagtttgaaattttcagattctgcggctatagaaaagtataattctttggtagaatggggaacatctacttactggaaaataggcgtgcaaaaggtagctaatgtcgagacgtcaatatctgattattatgatgaggtaaaaaataaaccgtttaatattgatccgggatattacattttcttaccggtatattttggaagcgtctttatttattcgaagggtaaaaatatggtagaacttggatctggaaactcttttcaaataccagatgatatgcgaagtgcgtgtaacaaagtattagacagcgataacggaatagactttctgagatttgttttgttaaacaatagatggataatggaagatgctatatcaaaatatcagtctccagttaatatatttaaactagctagtgagtacggattaaacatacccaaatatttagaaattgaaatagaggaagacacattatttgacgacgagttatactctattatagaacgctctttcgatgataaatttccaaaaatatccatatcgtatattaagttgggagaacttagacggcaagttgtagactttttcaaattctcgttcatgtatattgagtccatcaaggtagatcgtataggagataatatttttattcctagcgttataacaaaatcaggaaaaaagatattagtaaaagatgtagaccatttaatacgatccaaggttagagaacatacatttgtaaaagtaaaaaagaaaaacacattttccattttatacgactatgatggaaacggaacagaaactagaggagaagtaataaaacgaattatagacactataggacgagactattatgttaacggaaagtatttctctaaggttggtagtgcaggcttaaagcaattgactaataaattagatattaatgagtgcgcaactgtcgatgagttagttgatgagattaataaatccggaactgtaaaacgaaaaataaaaaaccaatcagcatttgatttaagcagagaatgtttgggatatccagaagcggattttataacgttagttaataacatgcggttcaaaatagaaaattgtaaggttgtaaatttcaatattgaaaatactaattgtttaaataacccgagtattgaaactatatatggaaactttaaccagttcgtctcaatctttaatatcgtcaccgatgtcaaaaaaagattattcgagtgaaataatatgcgcctttgatataggtgcaaaaaatcctgccagaactgttttagaagtcaaggataactccgttagggtattggatatatcaaaattagactggagttctgattgggaaaggcgcatagctaaagatttgtcacaatatgaatacactacagttcttctagaacgtcagcctagaaggtcgccgtacgtcaaatttatctattttattaaaggctttttatatcatacatcggctgccaaagttatttgcgtctcgcctgtcatgtctggtaattcatatagagatcgaaaaaagagatcggtcgaagcatttcttgattggatggacacattcggattgcgagactccgttccggatagacgcaaattagacgatgtagcggatagtttcaatttggctatgagatacgtattagataaatggaatactaattatacaccttataataggtgtaaatctagaaattacataaaaaaaatgtaataacgttagtaacgccattatggataatctatttacctttctacatgaaatagaagatagatatgccagaactatttttaactttcatctaataagttgcgatgaaataggagatatatatggtcttatgaaagaacgcatttcctcagaggatatgtttgataatatagtgtataataaagatatacatcatgccattaagaaactagtgtattgcgacatccaacttactaaacacattattaatcagaatacgtatccggtatttaacgattcttcacaagtgaaatgttgtcattatttcgacataaactcagataatagcaatattagctctcgtacagtagagatatttgagagggaaaagtcatctcttgtatcatatattaaaactaccaataagaagagaaaggtcaattacggcgaaataaagaaaactgttcatggaggcactaatgcaaattacttttccggtaaaaagtctgacgagtatctgagtactacagttagatccaacattaatcaaccttggatcaaaaccatctctaagaggatgagagttgatatcattaatcactctatagtaacgcgtggaaaaagctctatattacaaactatagaaattatttttactaatagaacatgtgtgaaaatattcaaggattctactatgcacattattctatccaaggacaaggatgaaaaggggtgtatacacatgattgacaaattattctatgtctattataatttatttctgttgttcgaggatatcatccaaaacgagtactttaaagaagtagctaatgttgtaaaccacgtacttacggctacggcattagatgagaaattattcctaattaagaaaatggctgaacacgatgtttatggagttagcaatttcaaaatagggatgtttaacctgacatttattaagtcgttggatcataccgttttcccctctctgttagatgaggatagcaaaataaagttttttaaggggaaaaagctcaatattgtagcattacgatctctggaggattgtataaattacgtgactaaatccgagaatatgatagaaatgatgaaggaaagatcgactattttaaatagcatagatatagaaacggaatcggtagatcgtctaaaagaattgcttctaaaatgaaaaaaaacactgattcagaaatggatcaacgactcggatataagtttttggtgcctgatcctaaagccggagttttttatagaccgttacatttccaatatgtatcgtattctaattttatattgcatcgattgcatgaaatcttgaccgtcaagcggccactcttatcgtttaagaataatacagaacgaattatgatagaaattagcaatgttaaagtgactcctccagattactcacctataatcgcgagtattaaaggtaagagttatgacgcattagccacgttcactgtaaatatctttaaagaggtaatgaccaaagagggtatatccatcactaaaataagtagttatgagggaaaagattctcatttgataaaaattccgctactaataggatacgggaataaaaatccacttgatacagccaagtatcttgttcctaatgtcataggtggagtctttatcaataaacaatctgtcgaaaaagtaggaattaatctagtagaaaagattacaacatggccaaaatttagggttgttaagccaaactcattcactttctcgttttcctccgtatcccctcctaatgtattaccgacaagatatcgccattacaagatatctctggatatatcacaattggaagcgtcgaatatatcatcgacaaagacatttataacggtcaatattgttttgctgtctcaatatttatctagagtgagtctagaattcattagacgtagcttatcatacgatatgcctccagaagttgtctatctagtaaacgcgataatagatagtgctaaacgaattactgaatctattactgactttaatattgatacatacattaatgacctggtggaagctgaacacattaaacaaaaatctcagttaacgatcaacgagttcaaatatgaaatgctgcataactttttacctcatatgaactatacacccgatcaactaaagggattttatatgatatctttactaagaaagtttctctactgtatctaccacacttctagatatccagatagagattcgatggtttgtcatcgtatactaacatacggcaaatattttgagacgttggcacatgatgaattagagaattacataggcaacatccgaaacgatatcatgaacaatcacaagaacagaggcacttacgcggtaaacattcatgtactaacaactcctggacttaatcatgcattttctagtctattgagtggaaagttcaaaaagtcagacggtagttatcgaacacatcctcactattcatggatgcagaatatttctattcctaggagtgttggattttatccggatcaagtaaagatttcaaagatgttttctgtcagaaaataccatccaagtcaatatctttacttttgttcatcagacgttccggaaagaggtcctcaggtaggtttagtatctcaattgtctgtcttgagttccattacaaatatactaacgtctgagtatttggatttggaaaagaaaatttgtgagtatatcagatcatattataaagatgatataagttactttgaaacaggatttccaatcactatagaaaatgctctagtcgcatctcttaatccaaatatgatatgtgattttgtaactgactttagacgtagaaaacggatgggattcttcggtaacttggaggtaggtattactttagttagggatcacatgaatgaaattcgcattaatattggagcgggaagattagtcagaccattcttggttgtggataacggagagctcatgatggatgtgtgtccggagttagaaagcagattagacgacatgacattctctgacattcagaaagagtttccgcatgtcatcgaaatggtagatatagaacaatttacttttagtaacgtatgtgaatcggttcaaaaatttagaatgatgtcaaaggatgaaagaaagcaatacgatttatgtgactttcctgccgaatttagagatggatatgtggcatcttcattagtgggaatcaatcacaattctggacccagagctattcttggatgtgctcaagctaaacaagctatctcttgtctgagctcggatatacgaaataaaatagacaatggaattcatttgatgtatccagagaggccaatcgtgattagtaaggctttagaaacttcaaagattgcggctaattgcttcggccaacatgttactatagcattaatgtcgtacaaaggtatcaatcaagaggatggaattatcatcaaaaaacaatttattcagagaggcggtctcgatattgttacagccaagaaacatcaagtagaaattccattggaaaactttaataacaaagaaagagataggtctaacgcctattcaaaattagaaagtaatggattagttagactgaatgctttcttggaatccggagacgctatggcacgaaatatctcatcaagaactcttgaagatgattttgctagagataatcagattagcttcgatgtttccgagaaatataccgatatgtacaaatctcgcgttgaacgagtacaagtagaacttactgacaaagttaaggtacgagtattaaccatgaaagaaagaagacccattctaggagacaaatttaccactagaacgagtcaaaagggaacagtcgcgtatgtcgcggatgaaacggaacttccatacgacgaaaatggtatcacaccagatgtcattattaattctacatccatcttctctagaaaaactatatctatgttgatagaggttattttaacagccgcatattctgctaagccgtacaacaataagggagaaaaccgacctgtctgttttcctagtagtaacgaaacatccatcgatacatatatgcaattcgctaaacaatgttatgagcattcaaatccgaaattgtctgatgaagaattatcggataaaatcttttgtgaaaagattctctatgatcctgaaacggataagccttatgcatccaaagtattttttggaccaatttattacttgcgtctgagacatttaactcaggacaaggcaaccgttagatgtagaggtaaaaagacgaagctcattagacaggcgaatgagggacgaaaacgtggaggaggtatcaagttcggagaaatggagagagactgtttaatagcgcatggtgcagccaatactattacagaagttttgaaagattcggaagaagattatcaagatgtgtatgtttgtgaaaattgtggagacatagcagcacaaatcaagggtattaatacatgtcttagatgttcaaaacttaatctctctcctctcttaacaaaaattgataccacacacgtatctaaagtatttcttactcaaatgaacgccagaggcgtaaaagtcaaattagatttcgaacgaagacctccttcgttttataaaccattagataaagttgatctcaaaccgtcttttctggtctaatattgtttagtagatacttatcaacatcatcaagattatcaagattatcaagattatcaagataagctaattcactaaacacattatcgatttcggtatcgttactcgcagaataaagttcgttatgatcctgatattcggaaatctgtggagtttcaggttttggtggatgtgtaacagctacttgagataccgaagtctgatattcagaaagctgtggatgttctggttcggcatccaccgatggtgttacaccactactaattggttcagtaacgtctgtggacgatggaggcaccacttctacaggttctggttctttatcctcagtcatcaacggagctacttcaatgcgaggaaatgtataatttggtaatggtttctcatgtggatctgaagaagaggtaagatatctactagaaagataccgatcacgttctagttctcttttgtagaacttaactttttctttctcagcatctagttgatattccaacctcttcacgttactacgttcagatttcaattcacgttcgcatgggttacctccgcagtttttacgagcgatttcacgttcagccttcatgcgtctctccctctctctatcgagtttatcagagcagtctttctgaaggcgatcgaactccataaatttctccaacgctttgattgtttccatagatttccgaagttcagcttttaggactgtgattctttttctttcgaattcacagctggatgtacaaccgtttccattaccgccatctctaagtttcttttctagatcggcaacatttcatccccatgccttttacattcctcgagtctactgtcgtcgaaatatcgttccagctccttttcgacatcaataactttagcacgttgtctctcaagctctcttttgtagttatctgattccctggcacgtttaagatcttcatgcaattgagtcagctcttaacacaatctcttgcttcttcgtcatagtacgcgcaatcactgtgagatccattgttaccacgtctacactcggcgagctcgcgtttaagagattcaatttcccgtttgtattggtccatgtttccattgctaccaccattagatttacaggctgctagttgtcgttcgagatcagaaatacgggttttcttggaattgatttcgtcgatgtacttggcatcgaaacacttattaagttctttttccaattctacgattttatttctttcgcgagtcaattccctcctgtagtaactatctgttttgtcagattcacgctctctacgtagactttcttgcaagttactaatttgttccctagcacgtccgagtttagttttatatgctgaatagagttctgattcatcctttgagcagatctctagcgatcgtttaagattcctgattctagtctttagcctatttacctcctcagaagatgttccgttaccgttgcgtttacactcgttaagctgtctatcaagatccatgattctatctctaagacgttgcatctctctttccatatcagcattgctttcattattacgtctgcagtcactcaactgtctttcaatatctgagattctatctctaagacgtcgcatctctctctgtttcggcattggtttcattattacgtctacagtcgttcaactgtctttcaagatctgatattctagattggagtctgctaatctctgtagcattttcacggcattcactcagttgtctttcaagatctgaaattttagattggagtctgctaatctctgtaagatttcctcctccgctctcgatgcagtcggtcaacttattctctagttctctaatacgcgaacgcagtgcatcaacttcttgcgtgtcttcctggttgcgtgtacattcatcgagtctagattcgagatctctaacgcgtcgtcgttcttcctcaagttctctgcgtactacagaaagcgtgtccctatcttgttgatatttagcaatttctgattctagagtactgattttgcttacgtagttactaatatttgtcttggccttatcaagatcctccttgtatttgtcgcattccttgatatccctacgaagtctggacagttcccattcgacattacgacgtttatcgatttcagctcggagatcgtcatcgcgttgttttagccacatacgactgagttcaagttctcgttgacaagatccatctacttttccattcctaatagtatccagttccttttctagttctgaacgcatttctcgttccctatcaagcgattctctcaattctcggatagtcttcttatcaatttctaataaatctgaaccatcatctgtcccattttgaatatccctgtgttctttgatctcttttgtaagtcggtcgattctttcggttttataaacagaatccctttccaaagtcctaatcttactgagtttatcactaagttctgcattcaattcggtgagttttctcttggcttcttccaactctgttttaaactctccactatttccgcattcttcctcgcatttatctaaccattcaattagtttattaataactagttggtaatcagcgattcctatagccgttcttgtaattgtgggaacataattaggatcttctaatggattgtatggcttgatagcatcatctttatcattattagggggatggacaaccttaattggttggtcctcatctcctccagtagcgtgtggttcttcaatagccgtgttagtaataggcttaggcaaatgcttgtcgtacgcgggcacttcctcatccatcaagtatttataatcgggttctacgtctgaatattcttttctaagagacgcaacttctggagttagtagaagaactctgtttctatatctatcaacgctggaatcaatactcaagttaaggatagcgaatacctcatcgtcatcatccgtatcctctgaaacgccatcatatgacatttcatgaagtctaacgtattgataaacagaatcagatttagtattaaacagatccttaacctttttagtaaatgcatatgtatattttagatctccagatttcataatatggtcgcatgccttaaatgtcagtgcttccataatatagtctggaacactaattggtgatgaaaaagataccggaccatatgctacgttgataaataactctgagccactaactagataatgattaatgttaaggaagaggaaatattcagtgtataggtatgtcttggcgtcatatcttgtactaaacacgctaaacagtttgttaatgtgatcaatttccaatagattaattagagcagcaggaataccaacaaacatattaccacatccgtattttctatgaatatcacatatcatgttaaaaaatcttgatagaagagcgaatatctcgtctgacttaatgagtcgtagttcagcagcaacataagtcataactgtaaatagaacatactttcctgtagtgttgattctagactccacatcaacaccattattaaaaatagttttatatacatctttaatctgctctccgttaatcgtcgaacgttctagtatacggaaacactttgatttcttatctgtagttaatgacttagtgatatcacgaagaatattacgaattacatttcttgtttttcttgagagacctgattcagaactcaactcatcgttccatagtttttttacctcagtggcgaaatctttggagtgcttggtacatttttcaataaggttcgtgacctccatttattataaaaaaattttattcaaaacttaactacaatcgggtaattataaaatcgtagatctcccatgtggtggaatactaccatctatcgcatgtggatggacagtaggtaatggccatgggaacagtaatgtttgcatatttatctttcttgccagtattactgcatattgtcccaatgtttcgatgtgatgttctaacctatcaactgccgctgtatcacaacaatagtgtccgatgaaattaagattatgatccaatgtgtttaatatatgattatcaagtcttatacgatccgcgtcttttttgacaggatcaggttcttctacaggaagaagtttcggcctcttatgatattcatgtctgggaaacggtggtctagggtgaggctccggtatcggagtgggttttggattataatcatcatcgtctatgacatcatcttcgacttcgatatttattttgctatcttgatgatgtcctgtatcagttgcattttcagcactcgactgaatattagcgcattcattgtttattattaccatatttctaaacccaaaatgtatatgttgaacatcagtactatcgttgatgagtcttatagcatgaattcgcttatcgttatcgggtttagcttctgtcaccttagcaattccttttttattaaactctacataatcatatccatttctattgtttgttctaatataaacgagtatagcatcattgctaaatttttcaatagtatcgaaaacagaatatcctaaaccatataatatatattcaggaacactcaaactaaatgtccaggattctcctaaatacgtaaactttaatagtgcgaaatcattcaaaaatctaccacttatagatagatagtacataaatgcgtatagtagtctacctatctctttattatgaaaaccggcattacgatcatatatgtcgtgatatacctgtgatccgtttacgttaaaccataaatacatgggtgatcctataaacatgaatttatttctaattctcagagctatagttaattgaccgtgtaatatttgcttacatgcatacttgatacgctcattaataagatttttatcattgctcgttatctcagaatcgtatatataaggagtaccatcgtgattcttaccagatattatacaaaatactatatataaaatatattgaccaacgttagtaatcatataaatgtttaacgttttaaattttgtattcaatgatccattatcatacgctagcatggtcttatgatattcattctttaaaatataatattgtgttagccattgcattggggctcctaatggagattttttattctcatccattttaggataggctttcataaagtccctaataacttcgtgaataatgtttctatgttttctactgatgcatgtatttgcttcgatttttttatcccatgtttcatctatcatagatttaaacgcagtaatgctcgcaacattaacatcttgaaccgttggtacaattccgttccataaatttataatgttcgccatttatataactcattttttgaatatacttttaattaacaaaagagttaagttactcatatggacgccgtccagtctgaacatcaatctttttagccagagatatcatagccgctcttagagtttcagcgtgattttccaacctaaatagaacttcatcgttgcgtttacaacacttttctatttgttcaaactttgttgttacattagtaatctttttttccaaattagttagccgttgtttgagagtttcctcattgtcgtcttcatcggctttaacaattgcttcgcgtttagcctctggctttttagcagcctttgtagaaaaaaattcagttgctggaattgcaagatcgtcatctccggggaaaagagttccgtccatttaaagtacagattttagaaactgacactctgcgttatttatatttggtacaacacatggattataaatattgatgttaataacatcagaaaatgtaaagtctatacattgttgcatcgtgttaaattttctaatggatctagtattattgggtccaacttctgcctgaaatccaaatatggaagcggatacaaaaccgtttcctggataaaccacacatctccacttttgctttacatcagaaattgtgtcattgacatcttgaactctcctatctaatgccggtgttccacctatagattttgaatattcgaatgctgcatgagtagcattaaattccttaatattgccataattttcatatattgagtaaccctggataaaaagtaaacacaccgcagccgtcgctaccacaataaaaaaaattgatagagagttcatttataatctattagaagctgacaaaatttttttacacgcatcagacaatgctttaataaatagttcaacatctacttttgtcatatcgaaccgatggtatgattctaacctagaattacatccgaaaaagttgactatgttcatagtcattaagtcattaacaaacaacattccagactctggattataagacgatactgtttcgtcacaattacctaccttaatcatgtgattatgaatattggctattagagcaccttctaagaaatctataatatctttgaaacacgatttaaaatcaaaccacgaatatacttctacgaagaaagttagtttacccataggagaaataactataaatggagatctaaatacaaaatccggatctatgatagttttaacattattatattctctattaaatacctccacatctaaaaatgttaattttgaaactatgtcttcgtttattaccgtacctgaactaaacgctataagctctattgtttgagaactctttaaacgatattcttgaaatacatgtaacaaagtttcctttaactcggtcggtttatctaccatagttacagaatttgtatccttatctataatataataatcaaaatcgtataaagttatataattatcgcgttcagattgtgatcttttcaaatagactaaaaaccccatttctctagtaagtatcttatgtatatgtttgtaaaatatcttcatggtgggaatatgctctaccgcagttagccattcctcattgacagcggtagatgtattagacaaaactattccaatgtttaacaagggccattttacgagattattaaatccttgtttgataaatgtagccaatgagggttcgagttcaacgacgattgaattctcttcccgcggatgctgcatgatgaacgacgggatgttgttcgattgatttggaattctttttcgactttttgtttatattaaatattttaaaatttatagctgatagcaattcatgtactacggataatgtagacgcgtattgcgcatcgatatctttattattagataaatttatcaataaatgtgagaagtttgcctcgttaaggtcttccatttaaatattatataaacatttgtgtttgtatcttattcgtcttttatggaatagttttttactagtaaagctgcaattacacactttgtccgtaaaacataaatataaacaccagcttttatcaatcgttccaaaaagtcgacggcggacatttttaacatggcatctattttaaatacacttaggtttttggaaaaaacatcattttataattgtaacgattcaataactaaagaaaagattaagattaaacataagggaatgtcatttgtattttataagccaaagcattctaccgttgttaaatacttgtctggaggaggtatatatcatgatgatttggttgtattggggaaggtaacaattaatgatctaaagatgatgctattttacatggatttatcatatcatggagtgacaagtagtggagcaatttacaaattgggatcgtctatcgatagactttctctaaataggactattgttacaaaagttaataattatgatgatacattttttgacgacgatgattgatcgctattgcacaattttgtttttttactttctaatatagcgtttagattctttttcatgtgcgaatattgatttactaaaatatcgatgtttaacttttgttctatgacgtccttatcagcggtatcggtacatatacgtaattcaccttcacaaaatacggagtcttcgataataatagccaatcgattattggatctagcggtctgtatcatattcaacatgtttaatatatcctttcgtttcccctttacaggcatcgatcgtagcatattttccgcgtctgagatggaaatgttaaaactacaaaaatgcgtaatgttagcccgtcctaatattggtacgtgtctataagtttggcatagtagaataatagacgtgtttaaatgccttccaaagtttaagaattctattagagtattgcattttgatagtttatcgcctacatcatcaaaaataagtaaaaagtgtgctgattttttatgattttgtgcgacagcaatacatttttctatgttacttttagttcgtatcagattatattctagagattcctgactactaacgaaattaatatgatttggccaaatgtatccatcataatctggattataaacgggtgtaaacaagaatatatgtttatattttttaactagtgtagaaaacagagatagtaaatagatagtttttccagatccagatcctcccgttaaaaccattctaaacggcatttttaataaattttctcttgaaaattgtttttcttggaaacaattcataattatatttacagttactaaattaatttgataataaatcaaaatatggaaaactaaggtcgttagtagggaggagaacaaagaaggcatatcgtgatataaataacatttattatcatgatgacaccagaaaacgacgaagagcagacatctgtgttctccgctactgtttacggagacaaaattcagggaaagaataaacgcaaacgcgtgattggtctatgtattagaatatctatggttatttcactactatctatgattaccatgtccgcgtttctcatagtgcgcctaaatcaatgcatgtctgctaacgaggctgctattactgacgccgctgttgccgttgctgctgcatcatctactcatagaaaggttgcgtctagcactacgcaatatgatcacaaagaaagctgtaatggtttatattaccagggttcttgttatatattacattcagactaccagttattctcggatgctaaagcaaattgcactgcggaatcatcaacactacccaataaatccgatgtcttgattacctggctcattgattatgttgaggatacatggggatctgatggtaatccaattacaaaaactacatccgattatcaagattctgatatatcacaagaagttagaaagtatttttgtgttaaaacaatgaactaatatttatttttgtacattaataaatgaaatcgcttaatagacaaactgtaagtaggtttaagaagttgtcggtgccggccgctataatgatgatactctcaaccattattagtggcataggaacatttctgcattacaaagaagaactgatgcctagtgcttgcgccaatggatggatacaatacgataaacattgttatctagataccaacattaaaatgtctacagataatgcggtttatcagtgtcgtaaattacgagctagattgcctagacctgatactagacatctgagagtattgtttagtattttttataaagattattgggtaagtttaaaaaagaccaataataaatggttagatattaataatgataaagatatagatattagtaaattaacaaattttaaacaactaaacagtacgacggatgctgaagcgtgttatatatacaagtctggaaaactggttgaaacagtatgtaaaagtactcaatctgtactatgtgttaaaaaattctacaagtgacaacaaaaactgcagaaaaattgaaaaactagcgtctttttttgctcgactcgagaccatggaggaatccgtggttcggccatctgtatttgtagttgacggccaaacggacattccattcactcgcttgggacgatcacacaggcgacagagttgttcagtcgccagggtgggattgggcttgctgctgctgctcatgggcgccggcttggccgttcaaggttggtttcttcttcagcttcactggcgcttgggggagatggttacgcggttgcccgacgggccagctgggtcttgggaacaactgatccaggagaggagatcacatgaggtcaaccccgcagcgcacttgactggagccaattcttccctcacgggctcaggcggccccctgctctgggagacacagctgggactcgcttttctgcgaggactgtcttatcacgatggagcgctggtggtaaccaagacggggtactactatatctatagtaaggtacagcttggcggggtcggatgcccgctcgggttggcgggaacaatcacccacggtctgtacaagagaacacctcggtacccggaggaacttgaacttctggtgagccagcagagcccgtgtggtagagcaacatccagttccagagtatggtgggattcatcctttctcgggggtgtggtacatctggaggctggcgaaaaagtggtcgtgagagtgcttggaaagaggctcgtacgattgagagatggaactagatcatactttggggcgtttatggtgtgattaattaatttttatgagctcagacggcaatggatggatcataattgatgggaaatgcaatagtaattttttatcataaaagttgtaaagtaaataataaaacaataaatattgaactagtagtacgtatattgagcaatcagaaatgatgctggtacctcttatcacggtgaccgtagttgcgggaacaatattagtatgttatatattatatatttgtaggaaaaagatacgtactgtctataatgacaataaaattatcatgacaaaattaaaaaagataaagagttctaattccagcaaatctagtaaatcaactgatagcgaatcagactgggaggatcactgtagtgctatggaacaaaacaatgacgtagataatatttctaggaatgagatattggacgatgatagcttcgctggtagtttaatatgggataacgaatccaatgttatggcgcctagcacagaacacatttacgatagtgttgctggaagcacgctgctaataaataatgatcgtaatgaacagactatttatcagaacactacagtagtaattaatgaaacggagactgttaaagtacttaatgaagataccaaacagaatcctaactattcatccaatcctttcgtaaattataataaaaccagtatttgtagcaagtcaaatccgtttattacagaacttaacaataaatttagtgagaataatccgtttagacgagcacatagcgatgattatcttaataagcaagaacaagatcatgaacacgatgatatagaatcatcggtcgtatcattggtgtgattagtttcctttttataaaattgaagtaatatttagtattattgctgccgtcacgttgtacaaatggagatattccctgtattcggcatttctaaaattagcaattttattgctaataatgactgtagatattatatagatacagaacatcaaaaaattatatctgatgagatcaatagacagatggatgaaacggtacttcttaccaacatcttaagcgtagaagttgtaaatgacaatgagatgtaccatcttattcctcatagattatcgacgattatactctgtattagttctgtcggaggatgtgttatctctatagataatgacgtcaatggcaaaaatattctaacctttcccattgatcatgctgtaatcatatccccactgagtaaatgtgtcgtagttagcaagggccctacaaccatactggttgctaaagcggatatacccagcaaacgattggtaacatcgtttacaaacgacatactgtatgtaaacaatctatcactgattaattatttgccgttgtctgtattcattattagacgagtcaccgactatttggatagacacatatgcgatcagatatttgctaataataagtggtattcccttataaccatcgacgataagcaatatcctattccatcaaattgtataggtatgtcttctgccaagtacataaattctagcatcgagcaagatactttaatacatgtttgtaacctcgagcatccattcgacttagtatacaaaaaaatgcagtcgtacaattctgtacctatcaaggaacaaatattgtacggtagaattgataatataaatatgagcattagtatttctgtggattaatagatttctagtatggggatcattaatcatctctaatctctaaatacctcataaaacgaaaaaaaagctattatcaaatactgtacggaatagattcattctcttctctttttatgaaactctgttgtatatctactgataaaactggaagcaaaaaatctgataaaaagaataagatcaagatcaaggattatatggaacacgattattataaaataacaatagttcctggttcctcttccacgtctactagctcgtggtattatacacatgcctagtaatagtctctttgcgttgatggaaagcagactagaaataacaggctaaaatgttcagacaccataatagttcccaacccagataataacagagtaccatcaacacattcctttaaactcaatcccaaacccaaaaccgttaaaatgtatccggccaattgatagtagataatgaggtgtacagcgcatgataatttacacagtaaccaaaatgaaaatactttagtaattataagaaatatagatggtaacgtcatcatcaacaatccaataatatgccggagagtaaacattgacggataaaacaaaaatgctccgcataactctatcatggcaataacacaaccaaatacttgtaagattcctaaattagtagaaaatacaacggatatcgatgtataagtgatctcgagaaataataagaataaagtaatgcccgtaaagataaacatcaacattgtttggtaatcattaaaccaattagtatgacgttgaactaatttcacagtaaattttattccagtattatccccgcatgtataagtacctggtaagatatctttatattccataatcaatgagacatcactatctgataacgaatgaagtctagcactagtatgccatttacttaatattgtcgtcttggaagttttattataagttaaaatatcatggttatccaatttccatctaatatactttgtcggattatctatagtacacggaataatgatggtatcattacatgctgtatactctatggtctttgtagttgttataacaaccaacgtatagaggtatatcaacgatattctaactcttgacattttttatttatttaaaatgatacctttgttatttattttattctattttgctaacggtattgaatggcataagtttgaaacgagtgaagaaataatttctacttacttattagacgacgtattatacacgggtgttaatggggcggtatacacattttcaaataataaactaaacaaaactggtttaactaataataattatataacaacatctataaaagtagaggatgcggataaggatacattagtatgcggaaccaataacggaaatcccaaatgttggaaaatagacggttcagacgacccaaaacatagaggtagaggatacgctccttatcaaaatagcaaagtaacgataatcagtcacaacggatgtgtactatctgacataaacatatcaaaagaaggaattaaacgatggagaagatttgacggaccatgtggttatgatttattcacggcggataacgtaattccaaaagatggtttacgaggagcattcgtcgataaagacggtacttatgacaaagtttacattcttttcactgatactatcggctcaaagagaattgttaaaattccgtatatagcacaaatgtgcctaaacgacgaaggtggtccatcatcgttgtctagtcatagatggtcgacgtttctcaaagtcgaattagaatgtgatatcgacggaagaagttatagataaattattcattctaaaactataaaaacagataatgatacgatactatatgtattcttcgatagtccgcattatgtacctattctatgaataccattaaacaatctttttctacgtcaaaattggaaggatatacaaagcaattgccgtctccagctcctggtatatgtctaccagctggaaaagttgttccacataccacgtttgaagtcatagaaaaatataatgtactagatgatattataaagcctttatctaaccaacctatcttcgaaggaccgtctggtgttaaatggttcgatataaaggagaaggaaaatgaacatcgggaatatagaatatacttcataaaagaaaattctatatattcgttcgatacaaaatctaaacaaactcgtagctcgcaagtcgatgcgcgactattttcagtaatggtaacttcgaaaccgttatttatagcagatatagggataggagtaggaatgccacaaatgaaaaaaatacttaaaatgtaatcttaatcgagtacaccacacgacaatgaacaaacataagacagattatgctggttatgcttgctgcgtaatatgcggtctaattgttggaattatttttacagcgacactattaaaagttgtagaacgtaaattagttcatacaccatcaatagataaaacgataaaagatgcatatattagagaagattgtcctactgactggataagctataataataaatgtatccatttatctactgatcgaaaaaacctgggaggaaggacgtaatgcatgcaaagctctaaatccaaattcggatctaattaagatagagactccaaacgagttaagttttttaagaagccttagacgaggctattgggtaggagaatccgaaatattaaaccagacaaccccatataattttatagctaaaaatgccacgaagaatggaactaaaaaacggaaatatatttgtagtacaacgaatactcccaaactgcattcgtgttacactatataacaattacactacatttttatcataacactacttcggttagatgttttagaaaaaaataaatatcgccgtaccgttcttgtttttataaaaataacaattaacaattatcaaattttttctttaatattttacgtggttgaccattcttggtggtaaaataatctcttagtgttggaatggaatgctgtttaatgtttccgcactcatcgtatattttgacgtatgcagtcacatcgtttacgcaatagtcagactgtagttctatcatgcttcctacatcagaaggaggaacagttttaaagtctcttggttttaatctattgccattagttttcatgaaatcctttgttttatccacttcacattttaaataaatgtccactatacattcttctgttaattttactagatcgtcatgggtcatagaatttataggttccgtagtccatggatccaaactagcaaacttcgcgtatacggtatcgcgattagtgtatacaccaactgtatgaaaattaagaaaacagtttaataaatcaacagaaatatttaatcctccgtttgatacagatgcgccatatttatggatttcggattcacacgttgtttgtctgaggtgttcgtctagtgttgcttctacgtaaacttcgattcccatatattctttattgtcagaatcgcataccgatttatcatcatacactgtttgaaaactaaatggtatacacatcaaaataataaataataacgagtacattctgcaatattgttatcgtaattggaaaattagtgttcgagtgagtcggattatgtgagtactggattgtatattttattttatattttgtaataagaataaaatgctaatgtcaagtttattccaatagatgtcttattaaaaaacatatataataaataacaatggctgaatggcataaaattatcgaggatatctcaaaaaataataagttcgaggatgccgccatcgttgattacaagactacaaagaatgttctagctgctattcctaacagaacatttgccaagattaatccgggtgaaattattcctctcatcactaatcgtaatattctaaaacctcttattggtcagaaatattgtattgtatatactaactctctaatggatgagaacacgtatgctatggagttgcttactgggtacgcccctgtatctccgatcgttatagcgagaactcataccgcacttatatttttgatgggtaagccaacaacatccagacgtgatgtgtatagaacgtgtagagatcacgctacccgtgtacgcgcaactggtaattaaaataaaaagtaatattcatatgtagtgtcaattttaaatgatgatgatgaaatggataatatccatattgacgatgtcaataatgccggtattggcatacagctcatcgatttttagatttcattcagaggatgtggaattatgttatgggcatttgtattttgataggatctataatgtagtaaatataaaatataatccgcatattccatatagatataattttattaatcgcacgttaaccgtagatgaactagacgataatgtcttttttacacatggttattttttaaaacacaaatatggttcacttaatcctagtttgattgtctcattatcaggaaacttaaaatataatgatatacaatgctcagtaaatgtatcgtgtctcattaaaaatttggcaacgagtacatctactatattaacatctaaacataagacttattctctacatcggtccacgtgtattactataataggatacgattctattatatggtataaagatataaatgacaagtataatgacatctatgattttactgcaatatgtatgctaatagcgtctacattgatagtgaccatatacgtgtttaaaaaaataaaaatgaactcttaattatgctatgctattagaaatggataaaatcaaaattacggttgattcaaaaattggtaatgttgttaccatatcgtataacttggaaaagataactattgatgttacacctaaaaagaaaaaagaaaaggatgtattattagcgcaatcagttgctgtcgaagaggcaaaagatgtcaaggtagaagaaaaaaatattatcgatattgaagatgacgatgatatggatgtagaaagcgcataatacgatctataaaaataagtatataataaatactttttatttacggtactcttgtagtggtgataccctactcaattatttttttaaaaaaatacttattctgattcttctagccatttccgtgttcgttcgaatgccacatcgacgttaaagataggggagtagttgaaatctagttctgcattgttggtacgcacctcaaatgtagtgttggatatcttcaacgtatagttgttgagtagtgatggttttctaaatagaattctcttcatatcattcttgcacgcgtacatttttagcatccatcttggaattctagatccttgttctattcccaatggtttcatcaatagaagattaaacatatcgtacgaacacgatggagagtaatcgtagcaaaagtaagcatttcctttaatcttagatcccggatactggatatattttgcagccaacacgtgcatccatgcagcatttcctacatatacccggctatgcaccgcgtcatcatcgactgtacgatacataatgttaccgtgttgcttacattgctcgtaaaagactttcgtcaatttgtctccttctccgtaaattccagtgggtcttaggcaacaagtatacaattttgctccattcatgattacggaattattggctttcataaccagttgctcggccatacgtttactttttgcgtatacatgtcctggtgatatatcataaagggtatgctcatggccgatgaatggatcaccgtgtttattgggtcctattgcttccatgctactagtatagatcaaatacttgattcctaggtccacacaagctgccaatatagtctgtgttccataatagtttactttcatgatttcattatcggtgtattttccaaatacatccactagagcagccgtatgaataatcagatttaccccatctagcgcttctctcaccttatcaaagtcgtttatatcacattgtatatagtttataaccttaactttcgaggttattggttgtggatcttctacaatatctatgactctgatttcttgaacatcatctgcactaattaacagttttactatatacctgcctagaaatccggcaccaccagtaaccgcgtacacggccattgctgccactcataatatcagactacttattctattttactaaataatggctgtttgtataatagaccacgataatatcagaggagttatttactttgaaccagtccatggaaaagataaagttttaggatcagttattggattaaaatccggaacgtatagtttgataattcatcgttacggagatattagtcaaggatgtgattccataggcagtccagaaatatttatcggtaacatctttgtaaacagatatggtgtagcatatgtttatttagatacagatgtaaatatatttacaattattggaaaggcgttatctatttcaaaaaatgatcagagattagcgtgtggagttattggtatttcttacataaatgaaaagataatacattttcttacaattaacgagaatggcgtttgatatatcagttaatgcgtctaaaacaataaatgcattagtttacttttctactcagcaaaataaattagtcatacgtaatgaagttaatgatacacactacactgtcgaatttgatagggacaaagtagttgacacgtttatttcatataatagacataatgacaccatagagataagaggggtgcttccagaggaaactaatattggttgcgcggttaatacgccggttagtatgacttacttgtataataagtatagttttaaactgattttagcagaatatataagacacagaaatactatatccggcaatatttattcggcattgatgacactagatgatttggctattaaacagtatggagacattgatctattatttaatgagaaacttaaagtagactccgattcgggactatttgactttgtcaactttgtaaaggatatgatatgttgtgattctagaatagtagtagctctatctagtctagtatctaaacattgggaattgacaaataaaaagtataggtgtatggcattagccgaacatatatctgatagtattccaatatctgagctatctagactacgatacaatctatgtaagtatctacgcggacacactgagagcatagaggatgaatttgattattttgaagacgatgattcgtctacatgttctgccgtaaccgacagggaaacggatgtataattttttttatagcgtgaaggatatgataaaaaatataattgttgtatttatcccattccaatcaccttatatgattctgtaaaaaaattatactgtaacacaataaaggagtcttatagatgtatagaggtcagatactggtttgataaactgtttattccacataagtatgtttgactttatggttagacccgcatactttaacaaatcactgaaaattggagttaggtattgacctctcagaatcagttgccgttctggaacattaaatgtattttttatgatatactccaacgcatttatgtgggcatacaacaagtcattactaatggagtattccaagagttttagttgtctagtatttaacaagagaagagatttcaacagactgtttatgaactcgaacgccgcctcattgtcgcttatattgatgatgtcgaattctcccaatatcatcactgatgagtagctcatcttgttatcgggatccaagttttctaaagatgtcattaaaccctcgatcatgaatggatttatcatcatcgtttttatgttggacatgagcttagtccgtttgtccacatctatagacgacgatttctgaattatttcatatatccctctctttaactccaggaacttgtcaggatggtctactttaatatgttctcgtctaagagatgaaaatctttggatggttgcacgcgacttttctttaaaggatgacgttgcccaagatcctctcttaaatgaatccatcttatccttggacaagatggacagtctattttccttagatggtttaatatttttgttacccatgatctataaaggtagacctaatcgtctcggatgaccatatatttattttcagttttattatacgcataaattgtaaaaaatatgttaggtttacaaaaatgtctcgtggggcattaatcgtttttgaaggattggacaaatctggaaaaacaacacaatgtatgaacatcatggaatctataccggcaaacacgataaaatatcttaactttcctcagagatccactgtcactggaaagatgatagatgactatctaactcgtaaaaaaacctataatgatcatatagttaatctattattttgtgcaaatagatgggagtttgcatcttttatacaagaacaactagaacagggaattactttaatagttgatagatacgcattttctggagtagcgtatgccgccgctaaaggcgcgtcaatgactctcagtaagagttatgaatctggattgcctaaacccgacttagttatattcttggaatctggtagcaaagaaattaatagaaacgtcggcgaggaaatttatgaagatgttacattccaacaaaaggtattacaagaatataaaaaaatgattgaagaaggagatattcattggcaaattatttcttctgaattcgaggaagatgtaaagaaggagttgattaagaatatagttatagaggctatacacacggttactggaccagtggggcaactgtggatgtaatagtgaaattacattttttataaatagatgttagtacagtgttataaatggatgaagcatattactctggcaacttggaatcagtactcggatacgtgtccgatatgcataccgaactcgcatcaatatctcaattagttattgccaagatagaaactatagataatgatatattaaacaaggacattgtaaattttatcatgtgtagatcaaacttggataatccatttatctctttcctagatactgtatatactattatagatcaagagatctatcagaccgaattgattaattcattagacgacaatgaaattatcgattgtatagttaacaagtttatgagcttttataaggataacctagaaaatatagtagatgctatcattactctaaaatatataatgaataatccagattttaaaactacgtatgccgaagtactcggttccagaatagccgatatagatattaaacaagtgatacgtaagaatatactacaattgtctaatgatatccgcgaacgatatttgtgaaaaatattaaaaaaaaatactttttttattaaatgacgtcgcttcgcgaatttagaaaattatgctgtgatatatatcacgcatcaggatataaagaaaaatctaaattaattagagactttataacagatagggatgataaatatttgatcattaagctattgcttcccggattagacgatagaatttataacatgaacgataaacaaattataaaattatatagtataatatttaaacaatctcaggaagatatgctacaagatttaggatacggatatataggagacactattaggactttcttcaaagagaacacagaaatccgtccacgagataaaagcattttaactttagaagaagtggatagttttttaactacgttatcatccgtaactaaagaatcgcatcaaataaaattattgactgatgtagcatctgtttgtacatgtaatgatttaaaatgtgtagtcatgcttattgataaagatctaaaaattaaagcgggccctcggtacgtacttaacgctattagtcctcatgcctatgatgtgtttagaaaatctaataacttgaaagagataatagaaaatgcatctaaacaaaatctagactctatatctatttctgttatgactccaattaatcccatgttagcggaatcgtgtgattctgtcaataaggcgtttaaaaaatttccatcaggaatgtttgcggaagtcaaatacgatggtgaaagagtacaagttcataaaaataataacgagtttgccttctttagtagaaacatgaaaccagtactctctcataaagtggattatctcaaagaatacataccgaaagcatttaaaaaagctacgtctatcgtattggattctgaaattgttcttgtagacgaacataatgtaccgctaccgtttggaagtttaggaatacacaaaaagaaagaatataaaaactctaacatgtgtttgttcgtgtttgactgtttgtactttgatggattcgatatgacggacattccattgtacgaacgaagatcttttctcaaagatgttatggttgaaatacccaatagaatagtattctcagagttgacgaatattagtaacgagtctcagttaactgacgtattggatgatgcactaacgagaaaattagaaggattggtcttaaaagatattaatggagtatacgaaccgggaaagagaagatggttaaaaataaagcgagactatttgaacgagggttccatggcagattctgccgatttagtagtactaggtgcctactatggtaaaggagcaaagggtggtatcatggcagtctttctaatgggttgttacgacgatgaatccggtaaatggaagacggttaccaagtgttcaggacacgatgataatacgttaagggagttgcaagaccaattaaagatgattaaaattaacaaggatcccaaaaaaattccagagtggttagtagttaataaaatctatattcccgattttgtagtagaggatccgaaacaatctcagatatgggaaatttcaggagcagagtttacatcttccaagtcccataccgcaaatggaatatccattagatttcctagatttactaggataagagaggataaaacgtggaaagaatctactcatctaaacgatttagtaaacttgactaaatcttaatagttacatacaaactgaaaattaaaataacaccatttagttggtggtcgccatggatggtgttattgtatactgtctaaacgcgttagtaaaacatggcgaggaaataaatcatataaaaaatgatttcatgattaaaccatgttgtgaaagagtttgtgaaaaagtcaagaacgttcacattggcggacaatctaaaaacaatacagtgattgcagatttgccatatatggataatgcggtatccgatgtatgcaattcactgtataaaaagaatgtatcaagaatatccagatttgctaatttgataaagatagatgacgatgacaagactcctactggtgtatataattattttaaacctaaagatgttattcctgttatcatatctataggaaaggataaagatgtctgtgaactattaatctcatcagacatatcgtgtgcatgcgtggagttaaattcatatcacgtagccattcttcccatgaatgtttccttttttaccaaaggaaatgcctcgttgattattctcctgtttgatttctctatcgatgcagcacctctcttaagaagtgtaaccgataataatgttattatatctagacaccagcgtctacatgacgagcttccgagttccaattggttcaagttttacataagtataaagtccgactattgttctatattatatatggttgttgatggatctgtgatgcatgcgatagctgataatagaactcacgcaattattagcaaaaatatattagacaatactacaattaacgatgagtgtagatgctgttattttgaaccacagattaggattcttgatagagatgagatgctcaatggatcatcgtgtgatatgaacagacattgtattatgatgaatttacctgatgtaggcgaatttggatctagtatgttggggaaatatgaacctgacatgattaagattgctctttcggtggctggtaatttaataagaaatcgagactacattcccgggagacgaggctatagctactacgtttacggtatagcctctagataatttttttaagcacgaaataaaaaacataattttaaaccaatctatttcatactattttgtgtgatcaccatggacataaagatagatattagtatttctggtgataaatttacggtgactactaggagggaaaatgaagaaagaaaaaaatatctacctctccaaaaagaaaaaactactgatgttatcaaacctgattatcttgagtacgatgacttgttagatagagatgagatgtttactattctagaggaatattttatgtacagaggtctattaggcctcagaataaaatatggacgactctttaacgaaattaaaaaattcgacaatgatgcggaagaacaattcggtactatagaagaactcaagcagaaacttagattaaattctgaagagggagcagataactttatagattatataaaggtacaaaaacaggatatcgtcaaacttactgtatacgattgcatatctatgataggattgtgtgcatgcgtggtagatgtttggagaaatgagaaactgttttctagatggaaatattgtttacgagcgattaaactgtttattaatgatcacatgcttgataagataaaatctatactgcagaatagactagtatatgtggaaatgtcatagaaagttaatgagagcaaaaatatataaggttgtattccatatttgttattttttctgtaatagttaaaaaaatacattcgatggtctatctatcagattattatgtgttataaggtactttttctcataataaactagagtatgagtaagatagtgtttttcaaaacatataaatctaaaattgatggatgagatatacagctattaatttcgaaaatatataaatctaaaattgatggataagatatacagctattaatttcgaaaatatattttaatctgataactttaaacatggatttttgatggtggtttaacgttttaaaaaaagattttgttattgtagtatatgataatattaaaagatggatataaagaatttgctgactgcatgtactattttttacattactacattggctacggcagatatacctactccgccaccaacgggtcatgtgacaagggagaatatcttgataagaggcataatcaatgttgtaatcggtgtccacctggagaatttgccaaggttagatgtaatggtaacgataacacaaaatgtgaacgctgcccacctcatacatataccacaatccccaattattctaatggatgtcatcaatgtagaaaatgcccaaccggatcatttgataaggtaaagtgtaccggaacacagaacagtaaatgttcgtgtcttcctggttggtattgcgctactgattcttcacagactgaagattgttgaaattgtgtaccaaaaaggagatgtccatgcggatactttggtggaatagatgaacaaggaaatcctatttgtaaatcgtgctgtattggtgaatattgcaactacctacgtaattatagacttgatccattttctccatgcaaactatctaaatgtaattaattatgattttgatgataatgttaccatacattatatcgctacttggttagtgtattattcagtatgaagacctattaataattacttatcttttgacgatcttgttataattataatataaaaacttatggcatagtaactcataattgctgacgcgataaattcgtaataatctgttttgttcaaatttttataaggaatctacaggcataaaaataaaaatataatttataatatactcttacagcgcgccatcatgaatagcagcagtaaattaattgctgttattaatggatttagaaatagtggacgattttgtgatattaatatagttattaatgatgaaaggataaacgctcacagactcatcctatctggagcctccgaatatttttccattctgttttccaataattttatcgattctaatgaatacgaagttaatctaagtcatttagattatcaaagtgttaacgatttgatcgattacatttatgggatacctttgagcctaactaacgataacgtgaaatatattctttcaaccgctgattttttacaaattggatctgccattactgagtgcgaaaaatacatacttaaaaatctttgttctagaaactgtatcgatttctacatatacgctgataaatataataacaagaaaatagaatcagcgtcgtttaacacaatattacgaaatattttgagactcatcaacgatgaaaactttaaatacttaacagaggaatcaatgataaaaattttaagcgatgatatgttaaatataaaaaatgaggattttgcaccactaattctcattaaatggttagagagtactcaacaatcatgcaccgtcgagttacttagatgcctcagaatatcattgctttccccacaagttataaaatcactttatagtcatcaactggttagttcaatctacgaatgtataacattcttaaacaatatagcattcttggatgaatcatttcctagataccatagcatcgagttgatatctatcggtataagtaattcgcatgataagatttccataaactgctacaatcataaaaaaaatacatgggaaatgatatcttcacgtagatataggtgtagtttcgcagtggccgtcctggataatattatctatatgatgggtggatatgatcagtccccgtatagaagttcaaaggttatagcgtacaatacatgtacaaattcttggatatatgatataccagagctaaaatatcctcgttctaattgtgggggactggctgatgacgaatacatttattgtataggcggcatacgcgatcaggattcatcgttgacatctagtattgatagatggaagccatcaaaaccatattggcagaagtatgctaaaatgcgcgaaccaaaatgtgatatgggggttgcgatgttaaacggattaatatatgtcatgggtggaatcgttaaaggtgacacgtgtaccgacgcactagagagtttatcagaagatggatggatgaagcatcaacgtcttccaataaaaatgtccaatatgtcgacgattgttcatgatggcaagatttatatatctggaggttacaacaatagtagtgtagttaatgtaatatcgaatctagtccttagctataatccgatatatgatgaatggaccaaattatcatcattaaacattcctagaattaatcccgctctatggtcagcgcataataaattatatgtaggaggaggaatatctgatgatgttcgaactaatacatctgaaacatacgataaagaaaaagattgttggacattggataatggtcacgtgttaccacgcaattatataatgtataaatgcgaaccgattaaacataaatatccattggaaaaaacacagtacacgaatgattttctaaagtatttggaaagttttataggtagttgatagaacaaaatacataattttgtaaaaataaatcactttttatactaatatgacacgattaccaatacttttgttactaatatcattagtatacgctacaccttttcctcagacatctaaaaaaataggtgatgatgcaactctatcatgtaatcgaaataatacaaatgactacgttgttatgagtgcttggtataaggagcccaattccattattcttttagctgctaaaagcgacgtcttgtattttgataattataccaaggataaaatatcttacgactctccatacgatgatctagttacaactatcacaattaaatcattgactgctagagatgccggtacttatgtatgtgcattctttatgacatcaactacaaatgacactgataaagtagattatgaagaatactccacagagttgattgtaaatacagatagtgaatcgactatagacataatactatctggatctacacattcaccagaaactagttctgagaaaccagaggatatagataattttaattgctcgtcggtattcgaaatcgcgactccggaaccaattactgataatgtagaagatcatacagacaccgtcacatacactagtgatagcattaatacagtaagtgcatcatctggagaatccacaacagacgagactccggaaccaattactgataaagaagaagatcatacagtcacagacactgtctcatacactacagtaagtacatcatctggaattgtcactactaaatcaaccaccgatgatgcggatctttatgatacgtacaatgataatgatacagtaccaccaactactgtaggcggtagtacaacctctattagcaattataaaaccaaggactttgtagaaatatttggtattaccgcattaattatattgtcggccgtggcaatattctgtattacatattatatatataataaacgttcacgtaaatacaaaacagagaacaaagtctagatttttgacttacataaatgtctgggatagtaaaatctatcatattgagcggaccatctggttcaggaaagacagccatagccaaaagactatgggaatatatttggatttgtggtgtcccataccactagatttcctcgtcctatggaacgagaaggtgtcgattaccattacgttaacagagaggccatctggaagggaatagccgccggaaactttctagaacatactgagtttttaggaaatatttacggaacttctaaaactgctgtgaatacagcggctattaataatcgtatttgtgtgatggatctaaacatcgatggcgttagaagtcttaaaaatacgtacctaatgccttactcggtgtatataagacctacctctcttaaaatggttgagaccaagcttcgttgtagaaacactgaagcggatgatgagattcatcgtcgtgtgatgttggcaaaaactgacatggatgaggcaggtgaagccggtctattcgacactattatcattgaagatgatgtgaatttagcatatagtaagttaattcagatactacaggaccgtattagaatgtattttaacactaattagagacttaagacttaaaacttgataattaataatataactcgtttttatatgtggctatttcaacgtctaatgtattagttaaatattaaaacttaccacgtaaaacttaaaatttaaaatgatatttcattgacagatagatcacacattatgaactttcaaggacttgtgttaactgacaattgcaaaaatcaatgggtcgttggaccattaataggaaaaggtggattcggtagtatttatactactaatgacaataattatgtagtaaaaatagagcccaaagctaacggatcattatttaccgaacaggcattttatactagagtacttaaaccatccgttatcgaagaatggaaaaaatctcacaatataaagcacgtaggtcttatcacgtgcaaggcatttggtctatacaaatccattaatgtggaatatcgattcttggtaattaatagattaggtgcagatctagatgcggtgatcagagccaataataatagattaccaaaaaggtcggtgatgttgatcggaatcgaaatcttaaataccatacaatttatgcacgagcaaggatattctcacggagatattaaagcgagtaatatagtcttggatcaaatagataagaataaattatatctagtggattacggattggtttctaaattcatgtctaatggcgaacatgttccatttataagaaatccaaataaaatggataacggtactctagaatttacacctatagattcgcataaaggatacgttgtatctagacgtggagatctagaaacacttggatattgtatgattagatggttgggaggtatcttgccatggactaagatatctgaaacaaagaattgtgcattagtaagtgccacaaaacagaaatatgttaacaatactgcgactttgttaatgaccagtttgcaatatgcacctagagaattgctgcaatatattaccatggtaaactctttgacatattttgaggaacccaattacgacgagtttcggcacatattaatgcagggtgtatattattaagtgtggtgtttggtcgatgtaaaatttttgtcgataaaaattaaaaaataacttaatttattattgatctcgtgtgtacaaccgaaatcatggcgatgttttacgcacacgctctcggtgggtacgacgagaatcttcatgcctttcctggaatatcatcgactgttgccaatgatgtcaggaaatattctgttgtgtcagtttataataacaagtatgacattgtaaaagacaaatatatgtggtgttacagtcaggtgaacaagagatatattggagcactgctgcctatgtttgagtgcaatgaatatctacaaattggagatccgatccatgatcaagaaggaaatcaaatctctatcatcacatatcgccacaaaaactactatgctctaagcggaatcgggtacgagagtctagacttgtgtttggaaggagtagggattcatcatcacgtacttgaaacaggaaacgctgtatatggaaaagttcaacatgattattctactatcaaagagaaggccaaagaaatgaatgcactcagttcaggacctatcatcgattaccacgtctggataggagattgtatctgtcaagttactgctgtggacgtacatggaaaggaaattatgagaatgagattcaaaaagggtgcggtgctacagatcccaaatctggtaaaagttaaacttggggagaatgatacagaaaatctttcttctactatatcggcggcaccatcgaggtaaccacctctcaagaagaccgcgtgaataatgtactcatgaaacgtttggaaactatacgccatatgtggtctgttgtatatgatcattttgatattgtgaatggtaaagaatgctgttatgtgcatacgcattcatctaatcaaaatcctataccgagtactgtaaaaacaaatttgtacatgaagactatgggatcatgcattcaaatggattccatggaagctctagagtatcttagcgaactgaaggaatcaggtggatggagtcccagaccagaaatgcaggaatttgaatatccagatggagtggaagacactgaatcaattgagagattggtagaggagttcttcaatagatcagaacttcaggctggtaaattagtcaaatttggtaattctattaattgttaaacatacatctgtttcagctaagcaactaagaacacgtatacggcagcagcttccttttatactctcatcttttaccaacacaaagggtggatatttgttcattggagttgataataatacacacaaagtatttggattcacggtgggttacgactacctcagactgatagagaatgatatagaaaagcatatcaaaagactttgtgttgtgcatttctgtgagaagaaagaggacatcaagtacacgtgtcgattcatcaaggtatataaacctggggatgaggctacctcgacatacgtgtgcgctatcaaagtggaaagatgctgttgtgctgtgtttgcagattggccagaatcatggtatatggatactaatggtatcaagaagtattctccagatgaatgggtgtcacatataaaattttaattaatgtaactatagagaacaaataataggttgtaatatcatatagacaataactaacaattaattagtaactgttatctcttttttaactaaccaactaactatatacctattaatacatcgtaattatagttcttaacatctattaatcattgattcgcttctttaattttttataaactaacattgttaattgaaaagggataacatgttacagaatataaattatatatggatttttttaaaaaggaaatacttgactggagtgtatatttatctcttcattatatagcacgcgtgtgttccaattcttccacatcccatataatacaggattataatctcgttcgaacatacgagaaagtggataaaacaatagttgattttttatctaggttgccaaatttattccatattttagaatatggggaaaatattctacatatttattctatggatgatgctaatacgaatattataattttttttctagatagagtattaaatattaataagaacgggtcatttatacacaatctcaggttatcatcatccattaatataaaagaatatgtatatcaattagttaataatgatcatccagataataggataagactaatgcttgaaaatggacgtagaacaagacattttttgtcctatatatcagatacagttaatatctatatatgtattttaataaatcatggattttatatagatgcagaagacagttacggttgtacattattacatagatgtatatatcactataagaaatcagaatcagaatcatacaatgaattaattaagatattgttaaataatggatccgatgtagataaaaaagatacgtacggaaacacaccttttatcctattatgtaaacacgatatcaacaacgtggaattgtttgagatatgtttagagaatgctaatatagactctgtagactttaatagatatacacctcttcattatgtctcatgtcgtaataaatatgattttgtaaagttattaatttctaaaggagcaaatgttaatgcgcgtaataaattcggaactactccattttattgtggaattatacacggtatctcgcttataaaactatatttggaatcagacacagagttagaaatagataatgaacatatagttcgtcatttaataatttttgatgctgttgaatctttagattatctattatccagaggagttattgatattaactatcgtactatatacaacgaaacatctatttacgacgctgtcagttataatgcgtataatacgttggtctatctattaaacagaaatggtgattttgagacgattactactagtggatgtacatgtatttcggaagcagtcgcaaacaacaacaaaataataatggaagtactattgtctaaacgaccatctttgaaaattatgatacagtctatgatagcaattactaaaaataaacaacataatgcagatttattgaaaatgtgtataaaatatactgcgtgtatgaccgattatgatactcttatagatgtacagtcgctacagcaatataaatggtatattttaaaatgtttcgatgaaatagatatcatgaagagatgttatataaaaaataaaactgtattccaattagttttttgtatcaaagacattaatactttaatgagatatggtaaacatccttctttcgtgaagtgcactagtctcgacgtatacggaagtcgtgtacgtaatatcatagcatctattagatatcgtcagagattaattagtctattatccaagaagctggatgcgggagataaatggtcgtgttttcctaacgaaataaaatataaaatattggaaaactttaacgataacgaactatccacatatctaaaaatcttataaacactattaaaatataaaatctaagtaggataaaatcacactacatcattgtttccttttagtgctcgacagtgtatactatttttaacactcataaataaaaatgaaaacgatttccgttgttacgttgttatgcgtactacctgctgttgtttattcaacatgtactgtacccactatgaataacgctaaattaacgtctaccgaaacatcgtttaatgataaacagaaagttacatttacatgtgatcagggatatcattctttggatccaaatgctgtctgcgaaacagataaatggaaatacgaaaatccatgcaagaaaatgtgcacagtttctgattatgtctctgaattatatgataagccattatacgaagtgaattccaccatgacactaagttgcaacggcgaaacaaaatattttcgttgcgaagaaaaaaatggaaatacttcttggaatgatactgttacgtgtcctaatgcggaatgtcaacctcttcaattagaacacggatcgtgtcaaccagttaaagaaaaatactcatttggggaatatatgactatcaactgtgatgttggatatgaggttattggtgcttcgtacataagttgtacagctaattcttggaatgttattccatcatgtcaacaaaaatgtgatataccgtctctatctaatggattaatttccggatctacattttctatcggtggcgttatacatcttagttgtaaaagtggttttatactaacgggatctccatcatccacatgtatcgacggtaaatggaatcccatactcccaacatgtgtacgatctaacgaaaaatttgatccagtggatgatggtcccgacgatgagacagatttgagcaaactctcgaaagacgttgtacaatatgaacaagaaatagaatcgttagaagcaacttatcatataatcatagtggcgttaacaattatgggcgtcatatttttaatctccgttatagtattagtttgttcctgtgacaaaaataatgaccaatataagttccataaattgctaccgtaaatataaatccgttaaaataattaataatttaataacaaacaagtatcaaaagattaaagacttatagctagaatcaattgagatgtcttcttcagtggatgttgatatctacgatgccgttagagcatttttactcaggcactattataacaagagatttattgtgtatggaagaagtaacgccatattacataatatatacaggctatttacaagatgcgccgttataccgttcgatgatatagtacgtactatgccaaatgaatcacgtgttaaacaatgggtgatggatacacttaatggtataatgatgaatgaacgcgatgtttctgtaagcgttggcaccggaatactattcatggaaatgtttttcgattacaataaaaatagtatcaacaatcaactaatgtatgatataattaatagcgtatctataattctagctaatgagagatatagaagcgcttttaacgacgatggtatatacatccgtagaaatatgattaacaagttgtacggatacgcatctctaactactattggcacgatcgctggaggtgtttgttattatctgttgatgcatctagttagtttgtataaataattatttcaatatactagttaaaattttaagattttaaatgtataaaaaactaataacgtttttatttgtaataggtgcattagcatcctattcgaataatgagtacactccgtttaataaactgagtgtaaaactctatatagatggagtagataatatagaaaattcatatactgatgataataatgaattggtgttaaattttaaagagtacacaatttctattattacagagtcatgcgacgtcggatttgattccatagatatagatgttataaacgactataaaattattgatatgtataccattgactcgtctactattcaacgcagaggtcacacgtgtagaatatctaccaaattatcatgccattatgataagtacccttatattcacaaatatgatggtgatgagcaacaatattctattactgcagagggaaaatgctataaaggaataaaatatgaaataagtatgatcaacgatgatactctattgagaaaacatactcttaaaattggatctacttatatatttgatcgtcatggacatagtaatacatattattcaaaatatgatttttaaaaatttaaaatatattatcacttcagtgacagtagtcaaataacaaacaacaccatgagatatattataattctcgcagttttgttcattaatagtatacacgctaaaataactagttataagtttgaatccgtcaattttgattccaaaattgaatggactggggatggtctatacaatatatcccttaaaaattatggcatcaagacgtggcaaacaatgtatacaaatgtaccagaaggaacatacgacatatccgcatttccaaagaatgatttcgtatctttctgggttaaatttgaacaaggcgattataaagtggaagagtattgtacgggactatgcgtcgaagtaaaaattggaccaccgactgtaacattgactgaatacgacgaccatatcaatttgtacatcgagcatccgtatgctactagaggtagcaaaaagattcctatttacaaacgcggtgacatgtgtgatatctacttgttgtatacggctaacttcacattcggagattctaaagaaccagtaccatatgatatcgatgactacgattgcacgtctacaggttgcagcatagactttgtcacaacagaaaaagtgtgcgtgacagcacagggagccacagaagggtttctcgaaaaaattactccatggagttcgaaagtatgtctgacacctaaaaagagtgtatatacatgcgcaattagatccaaagaagatgttcccaatttcaaggacaaaatggccagagttatcaagagaaaatttaataaacagtctcaatcttatttaactaaatttctcggtagcacatcaaatgatgttaccacttttcttagcatgcttaacttgactaaatattcataactaatttttattaatgatacaaaaacgaaataaaactgcatattatacactggttaacgcccttataggctctaaccattttcaagatgaggtccctgattatagtccttctgttcccctctatcatctactccatgtctattagacgatgtgagaagactgaagaggaaacatggggattgaaaatagggttgtgtataattgccaaagatttctatcccgaaagaactgattgcagtgttcatctcccaactgcaagtgaaggattgataactgaaggcaatggattcagggatatacgaaacaccgataaattataaaaaaagcaatgtgtccgctgtttccgttaataatactattttcgtaactggcggattattcataaataactctaatagcacgatcgtggttaacaatatggaaaaacttgacatttataaagacaaacaatggtcgattatagaaatgcctatggctagggtatatcacggcatcgactcgacatttggaatgttatattttgccggaggtctatccgttaccgaacaatatggtaatttagagaaaaacaacgagatatcttgttacaatcctagaacgaataagtggtttgatatttcatatactatttataagatatccatatcatcattgtgtaaactaaataacgtcttctatgtatttagtaaggacattggatatgtggaaaagtatgatggtgcatggaagttagtacatgatcgtctccccgctataaaggcattatcaacttctccttattgattgaaaatgaaaatataaatagtttttatgtatagcagtattaccctatagttttattgcttactactaacatggatacagatgttacaaatgtagaagatatcataaatgaaatagatagagagaaagaagaaatactaaaaaatgtagaaattgaaaataataaaaacattaacaagaatcatccaagtggatatattagagaagcactcgttattaatacaagtagtaatagtgattccattgataaagaagttatagaatgtatcagtcacgatgtaggaatatagatcatatctactaatttttataatcgatacaaaacataaaaaacaactcgttattacatagcaggcatggaatccttcaagtattgttttgataacgatggcaagaaatggattatcggaaatactttatattctggtaattcaatactatataaggtcagaaaaaatttcactagttcgttctacaattacgtaatgaaaatagatcacaaatcacacaagccattgttgtctgaaatacgattctatatatctgtattggatcctttgactatcgacaactggacacgggaacgtggtataaagtatttggctattccagatctgtatggaattggagaaaccgatgattatatgttcttcgttataaagaattcgggaagagtattcgccccaaaggatactgaatcagtcttcgaagcatgcgtcactatgataaacacgttagagtttatacactctcgaggatttacccatggaaaaatagaaccgaggaatatactgattagaaataaacgtctttcactaattgactattctagaactaacaaactatacaagagtggaaactcacatatagattacaacgaggacatgataacttcaggaaatatcaattatatgtgtgtagacaatcatcttggagcaacagtttcaaaacgaggagatttagaaatgttgggatattgcatgatagaatggttcggtggcaaacttccatggaaaaacgaaagtagtataaaagtaataaaacaaaaaaaagaatataaaaaatttatagctactttctttgaggactgttttcctgaaggaaatgaacctctggaattagttagatatatagaattagtatacacgttagattattctcaaactcctaattatgacagactacgtaaactgtttatacaagattgaaattatattctttttttatagagtgtggtagtgttacggatatctaatattaatattagactatctctatcgcgctacacgaccaatatcgattactatggatatcttcagggaaatcgcatcttctatgaaaggagagaatgtattcatttctccagcgtcaatctcgtcagtattgacaatactgtattatggagctaatggatccactgctgaacagctatcaaaatatgtagaaacggaggagaacacggataaggttagcgctcagaatatctcattcaaatccatgaataaagtatatgggcgatattctgccgtgtttaaagattcctttttgagaaaaattggcgataagtttcaaactgttgacttcactgattgtcgcactatagatgcaatcaacaagtgtgtagatatctttactgaggggaaaatcaatccactattggatgaaccattgtctcctgatacctgtctcctagcaattagtgccgtatactttaaagcaaaatggttgatgccattcgaaaaggaatttaccagtgattatcccttttacgtatctccgacggaaatggtagatgtaagtatgatgtctatgtacggcaaggcatttaatcacgcatctgtaaaggaatcattcggcaacttttcaatcatagaactgccatatgttggagatactagtatgatggtcattcttccagacaagattgatggattagaatccatagaacaaaatctaacagatacaaattttaagaaatggtgtaactctctggaagctacgtttatcgatgttcacattcccaagtttaaggtaacaggttcgtataatcttgtggatactctagtaaagtcaggactgacagaggtgttcggttcaactggagattatagcaatatgtgtaattcagatgtgagtgtcgacgctatgattcacaaaacgtatatagatgtcaatgaagagtatacagaagcagctgcagcaacttgtgcactggtgtcagactgtgcatcaacaattacaaatgagttctgtgtagatcatccgttcatctatgtgattaggcatgttgatggaaaaattcttttcgttggtagatattgctctccgacaactaattgttaaccattttttttaaaaaaatagaaaaaacatgtggtattagtgcaggtcgttgttcttccaattgcaattggtaagatgacggccaactttagtacccacgtcttttcaccacagcactgtggatgtgacagactgaccagtattgatgacgtcagacaatgtttgactgaatatatttattggtcgtcctatgcataccgcaacaggcaatgcgctggacagttgtattccacactcctctcttttagagatgatgcggaatcagtgttcatcgacattcgcgagctggtaaaaaatatgccgtgggatgatgtcaaagattgtacagaaatcatccgttgttatataccggatgagcaaaaaaccatcagagagatttcggccatcatcggactttgtgcatatgctgctacttactggggaggtgaagaccatcccactagtaacagtctgaacgcattgtttgtgatgcttgagatgctcaattacgtggattataacatcatattccggcgtatgaattgatgagttgtacatcttgacattttctttcttctcttctccctttcttctcttctcccttcctccctcttctccctttcccagaaacaaacttttttacccactataaaataaaatgagtatactacctattatatttcttcctatatttttttattcttcattcgttcagacttttaacgcgcctgaatgtatcgacaaagggcaatattttgcatcattcatggagttagaaaacgagccagtaatcttaccatgtcctcaaataaatacgctatcatccggatataatatattagatattttatgggaaaaacgaggagcggataatgatagaattataccgatagataatggtagcaatatgctaattctgaacccgacacaatcagactctggtatttatatatgcattaccacgaacgaaacctactgtgacatgatgtcgttaaatttgacaatcgtgtctgtctcagaatcaaatatagatcttatctcgtatccacaaatagtaaatgagagatctactggcgaaatggtatgtcccaatattaatgcatttattgctagtaacgtaaacgcagatattatatggagcggacatcgacgccttagaaataagagacttaaacaacggacacctggaattattaccatagaagatgttagaaaaaatgatgctggttattatacatgtgttttagaatatatatacagaggtaaaacatataacgtaaccagaattgtaaaattagaggtacgggataaaataataccttctactatgcaattaccagatggcattgtaacttcaataggtagtaatttgactattgcgtgtagagtatcgttgagacctcccacaacggatgcagacgtcttttggataagtaatggtatgtattacgaagaagatgatggggacggagacggtagaataagtgtagcaaataaaatctatatgaccgataagagacgtgttattacatcccggttaaacattaatcctgtcaaggaagaagatgctacaacgtttacgtgtatggcgtttactattcctagcatcagcaaaacagttactgttagtataacgtgaatgtatgttgttacatttccatgtcaattgagtttataagaatttttatacattatcttccaacaaacaattgacgaacgtattgctatgattaactcccacgatactatgcatattattaatcattaacttgcagactatacctagtgctattttgacatactcatgttcttgtgtaattgcggtatctatattattaaagtacgtaaatctagctatagttttattatttaattttagataatataccgtctccttatttttaaaaattgccacatcctttattaaatcatgaatgggaatttctatgtcatcgttagtatattgtgaacaacaagagcagatatctataggaaagggtggaatgcgatacattgatctatgtagttttaaaacacacgcgaactttgaagaatttatataaatcattccatcgatacatccttctatgttgacatgtatatatccaggaattcttttattaatgtcaggaaatgtataaactaaaacattgcccgaaagcggtgcctctatctgcgttatatccgttcttaacttacaaaatgtaaccaatacctttgcatgacttgttttgttcggcaacgttagtttaaacttgacgaatggattaattacaatagcatgatccgcgcatctattaagtttttttactttaacgcccttgtatgtttttacagagactttatctaaatttctagtacttgtatgtgttataaatataacgggatatagaactgaatcacctaccttagatacccaattacattttatcagatccagataataaacaaattttgtcgccctaactaattctatattgttatatattttacaattggttatgatatcatgtaataacttggagtctaacgcgcatcgtcgtacgtttatacaattgtgatttagtgtagtatatctacacatgtatttttccgcactatagtattctggactagtgataaaactatcgttatatctgtcttcaatgaactcatcgagatattgctctctgtcatattcatacacctgcataaactttctagacatcttacaatccgtgttattttaggatcatatttacatatttacgggtatatcaaagatgttagattagttaatgggaatcgtctataataatgaatattaaacaattatatgaggacttttaccacaaagcatcataaaaatgagtcgtcgtctgatttatgttttaaatatcaaccgcaaatcaactcataaaatacaagagaatgaaatatatacatattttagtcattgcaatatagaccatacttctacagaacttgattttgtagttaaaaactatgatctaaacagacgacaacatgtaactgggtatactgcactacactgctatttgtataataattactttacaaacgatgtactgaagatattattaaatcatgacgtaaatgtaacgatgaaaaccagtagcggacgtatgcctgtttatatattgcttactagatgttgcaatatttcacatgatgtagtgatagatatgatagacaaagataaaaaccacttattacatagagactattccaacctattactagagtatataaaatctcgttacatgttattaaaggaagaggatatcgatgagaacatagtatccactttattagataagggaatcgatcctaactttaaacaagacggatatacagcgttacattattattatttgtgtctcgcacacgtttataaaccaggtgagtgtagaaaaccgataacgataaaaaaggccaagcgaattatttctttgtttatacaacatggagctaatctaaacgcgttagataattgtggtaatacaccattccatttgtatcttagtattgaaatgtgtaataatattcatatgactaaaatgctgttgacttttaatccgaatttcaaaatatgtaataatcatggattaacgcctatactatgttatataacttccgactacatacaacacgatattcttgttatgttaatacatcactatgaaacaaatgttggagaaatgccgatagatgagcgtcgtatgatcgtattcgagtttatcaaaacatattctacacgtccggcagattcgataacttatttgatgaataggtttaaaaatataaatatttatacccgctatgaaggaaagacattattacacgtagcatgtgaatataataatacacacgtaatagattatcttatacgtatcaacggagatataaatgcgttaaccgacaataacaaacacgctacacaactcattatagataacaaagaaaattccccgtataccatcgattgtttactgtatatacttagatatattgtagataagaatgtgataagatcgttggtggatcaacttccatctctacctatcttcgatataaaatcatttgagaaattcatatcctactgtatacttttagatgacacattttacgataggcacgttaagaatcgcgattctaaaacgtatcgatacgcattttcaaaatacatgtcgtttgataaatacgatggtataataactaaatgtcacgacgaaacaatgttactcaaactgtccactgttctagacactacactatatgcagttttaagatgccataattcgaaaaagttaagaagatacctcaacgagttaaaaaaatataataacgataagtcctttaaaatatattctaatattatgaatgagagataccttaatgtatattataaagatatgtacgtgtcaaaggtatatgataaactatttcctgttttcacagataaaaattgtctactaacattactaccttcagaaattatatacgaaatattatacatgctgacaattaacgatctttataatatatcgtatccacctaccaaagtatagttgtatttttctcatgcgatgtgtgtaaaaaaactgatattatataaatattttagtgccgtataataaagatgacgatgaaaatgatggtacatatatatttcgtatcattattgttattgctattccacagttacgccatagacatcgaaaatgaaatcacagaattcttcaataaaatgagagatactctaccagctaaagactctaaatggttgaatccagcatgtatgttcggaggcacaatgaatgatatagccgctctaggagagccattcagcgcaaagtgtcctcctattgaagacagtcttttatcgcacagatataaagactatgtggttaaatgggagaggctagaaaagaatagacggcgacaggtttctaataaacgtgttaaacatggtgatttatggatagccaactatacatctaaattcagtaaccgtaggtatttgtgtaccgtaactacaaagaatggtgactgtgttcagggtatagttagatctcatattaaaaaacctccttcatgcattccaaaaacatatgaactaggtactcatgataagtatggcatagacttatactgtggaattctttacgcaaaacattataataatataacttggtataaagataataaggaaattaatatcgacgacattaagtattcacaaacgggaaagaaattaattattcataatccagagttagaagatagtggaagatacaactgttacgttcattacgacgacgttagaatcaagaatgatatcgtagtatcaagatgtaaaatacttacggttataccgtcgcaagaccacaggtttaaactaatactagatccaaaaatcaacgtaacgataggagaacctgccaatataacatgcactgctgtgtcaacgtcattattgattgacgatgtactgattgaatgggaaaatccatccggatggcttataggattcgattttgatgtatactctgttttaactagtagaggcggtattaccgaggcgaccttgtactttgaaaatgttactgaagaatatataggtaatacatataaatgtcgtggacacaactattattttgaaaaaacccttacaactacagtagtattggagtaaatacacaatgcatttttatatacattactgaataattattattattatttatatcgtatttgtgctataacgcgactatctaggtatttgtatctcactgatagagaacatataaatatagactctattaaacagttgtgtaaaatatcaaatcctaatagatgtggatgtacggctttacatgagtacttttataattatagatcagtcaacggaaaatacaagtatagatacaacggttactatcaatattatttatctagcgattatgaaaattataatgaatattattatgatgattatgatagaactggtatgaacagtgagagtgataatatatcaatcaaaacagaatatgaattctatgatgaaacacaagatcaaagtacacaactagtaggttacgacattaaactcaaaaccaatgaggatgattttatggctatgatagatcagtgggtgtccatgattatatagatgaatcaattaataaagtagtatatggaagagagtctcacgtaagatggcgggatatatggcaagaacataatgatggcgtatacagtataggaaaggagtgcatagataatatatacgaagacaaccataccgtagacgaattctacaagatagacagcgtatcagatgtagatgacgcggaacacatatctccgataactaatgatgtatctacacaaacatgggaaaagaaatcagagttagatagatacatggaaatgtatcctcgtcatagatatagtaagcattctgtctttaagggattttctgacaaagttagaaaaaatgatttagacatgaatgtggtaaaagaattactttctaacggtgcatctctaacaattaaggatagcagtaataaggatccaataaccgtttattttcgaagaacgataatgaatttagaaatgattgatattattaacaaacatacaactattgatgaacgaaagtatatagtacactcctatctaaaaaattataaaaatttcgattatccatttttcaggaagttagttttgactaataaacattgtctcaacaattattataatataagcgacagcaaatatggaacaccgctacatatattggcgtctaataaaaaattaataactcctaattacatgaagttattagtgtataacggaaatgatataaacgcacgaggtgaagatacacaaatgcgaactccattacacaaatatttgtgtaaatttgtatatcataatattgaatatggtatccgatactataatgaaaagattatagacgcatttatagagttaggagccgatctaactattccaaataacgatggaatgataccagtagtttactgtatacactcaaatgcagaatatggttataacaatattactaacataaagataatacgtaaactacttaatcttagtagacgtgcgtcacataatctatttagagatcgagtcatgcacgattatataagtaatacatatattgatcttgagtgtttagatattattagatcgttggatggattcgatatcaatggttactttgaaggacgtacaccacttcattgcgctatacaacataacttcactcagattgctaagtacttattagatcgaggagctgatatagtcgtacccaacacattgattatacatcagtacatacagtaaatagcatagatatggaggaggatacaaatatttcaaataaagttataaggtacaacactgtcaataatatatggaagacattacctaacttctggactggaactataaatccaggcgtggtctcgcataaagatgatatatatgttgtatgcgacatcaaagatgaaaaaaatgttaagacttgtatatttagatataacacgaatacgtataacggatgggaattggttacgacgacagaaagcagattatcagctctgcatactattcttcatgacaataccataatgatgttacattgttatgaatcgtatatgttacaagatacatttaatgtgtacactcgcgaatggaatcatatgtgtcatcaacattcgaatagttatatcatgtacaatatactacccatctactaaatataatagaataaaataaatgagtatgatcattttagataacgattgattttatcattaccgcttcattcttatattctttgcttacggaacctatatttagaaacatctactaacgattttttatgcttgcattattaatggtatgtaatatgattgattgtgtacgcaataccaatttgttaagtatgaatacggggtacaaacataaactgaaatttaacattatttatttatgatatatatcgttatcgttattgtttggtctataccatggatatctttaaagaactaatcttaaaacaccctgatgaaaatgttttgatttctccagtttctattttatctactttatctattctaaatcatggagcagctggttctacagctgaacaactatcaaaatatatagagaatatgaatgagaatacacccgatgataagaaggatgacaataatgacatggacgtagatattccgtattgtgcgacactagctaccgcaaataaaatatacggtagcgatagtatcgagttccacgcctccttcctacaaaaaataaaagacgattttcaaactgtaaactttaataatgctaaccaaacaaaggaactaatcaacgaatgggttaagacgatgacaaatggtaaaattaattccttattgactagtccgctatccattaatactcgtatgacagttgttagcgccgtccattttaaagcaatgtggaaatatccattttctaaacatcttacatatacagacaagttttatatttctaagaatatagttaccagtgttgatatgatggtgggtaccgagaataacttgcaatatgtacatattaatgaattattcggaggattctctattatcgatattccatacgagggaaactctagtatggtaattatactaccggacgacatagaaggtatatataacatagaaaaaaatataacagatgaaaaatttaaaaaatggtgtggtatgttatctactaaaagtatagacttgtatatgccaaagtttaaagtggaaatgacagaaccgtataatctggtaccgattttagaaaatttaggacttactaatatattcggatattatgcagattttagcaagatgtgtaatgaaactatcactgtagaaaaatttctacatacgacgtttatagatgttaatgaggagtatacagaagcatcggccgttacaggagtatttatgactaacttttcgatggtatatcgtacgaaggtctacataaaccatccattcatgtacatgattaaagacaacacaggacgtatactttttatagggaaatactgctatccgcaataaatataaacaaatagacttttatcacgtttatctatgtctaaatattacaaatagtaatagtataaactaaagctgataatacttaaaaaaataataatatcatttacaattaatagtataaactaaaaattaaacaaatcgttattataagtaatatcaaaatgatgatatacggattaatagcgtgtcttatattcgtgacttcatccatcgctagtccactttatattcccgttattccacccattacggaagataaatcgttcaatagtgtagaggtattagtttccttgtttagagatgaccaaaaagactatacggtaacttctcagttcaataactacactatcgataccaaagactggactatcggcgtactatccacacctgatggtttggatataccattgactaatataacttattggtcacggtttactataggtcgtgcattgttcaaatcagagtctgaggatattttccaaaagaaaatgagtattctaggtgtttctatagaatgtaagaagtcgtcgacattacttacttttttgaccgtgcgtaaaatgactcgagtatttaataaatttccagatatggcttattatcgaggagactgtttaaaagccgtttatgtaacaatgacttataaaaatactaaaactggagagactgattacacgtacctctctaatggggggttgcctgcatactatcgtaatggggtcgatggttgattattgattagtatattccttattcacacaaaaagaacatttttataaacatgaaaccactgtctaaatgtaattatgatcttgatttatagatgaagatcagcctttagaggattttaaccagtatgtttaatatgaaaaaaataaacataacatattttgagattaagcgctattgtgcttaattattttgctctataaactgaatatatagccacaattattgacgggcttgtttatgaccggcaatcatgaatttacagaaattatctctggctatatatcttactgcgacatgttcgtggtgttatgaaacatgcataagaaaaactgcgttgtatcatgacattcaattggagcatgtagaagacaataaagatagtgtagcgtcgctaccgtacaagtagtcaatcaaagagaacgtagtagattgttggctacatttaattggacagatatagctgagggtgttagaaatgagttcattaaaatatgtgatatcaacggaacatatttatataattatactattgctgttagtataattattgattccacggaagaactaccaacagttactccaattacaacaacatatgaaccttctacatataattatactatcgatgatagcactgttattactactgaagaactacaagtgactcctcatatggatctccatcgatgatacatgtattaaaatactttccgaataagtcttttaaatattgtattaattatgaaaaactatgctatgcgagtatgatgcaaagatgtttaatgatacgatactagattttatctctagcgagagatgtcgttagaatcatttatcataactacgtttaataataattcatcaacgaatatcgataacatgtgtcatttatacgttaaagtctgtccgtcttctctattgtttagactgtttgtagaatgctgtgatataaacaaactagtagaaggtacgactccgttacactgttatctaatgaatgaaggatttgaatcatctgttttaaaaaacctattaaaggagtatgtcatgaatacgtttaatgttcatgacatccattacacaaatatttaactcatgatgaagttgagaatgatatgctttctgatagtatagatagctttagctaatataaaaatatattaatccactatatattctagacttgatttaaaaccgataaactactactacgtactgtataagttgttaaaaaaaggagcagaccctaattatgtagatgatagaggtaatacttttcttcattacttctgcatctatatgtccacttatgagaaaacgtcatttaataagatgcatcgtgaaaagaaatttattaaagagttggtaaaatatgaaaccgaaagtaaataatataggaaatacacctctacataactacgtatctcaatatgatatcactctcattcctcatccacaacccattaaaaaaatggaaattaaagccctctattagcataaacggctacaggtctacctttacaatggcctctccttgtgcccagttcagaccctgtcattgccacgctactaaggactccctgaataccgtggccgacgtcagacattgtctgactgaatacatcctgtgggtttctcatagatggacccatagagaaagcgcagggtctctctacaggcttctcatctctttcagaactgatgcaacggagctctttggtggtgagttgaaggattcacttccgtgggacaatatcgacaattgcgtggagatcattaaatgtttcatcagaaatgactccatgaaaaccgccgaagaacttcgtgcaatcattggactttgtactcaatcagctatcgtctctggaagagtcttcaacgataagtatatcgacatactacttatgctgcgaaagattctgaacgagaacgactatctcaccctcttggatcatatccgcactgctaaatactaaatctccttcatgctctctcactacactttttatcatcttatgaggaatgattgccttcatcatttttcgtgaaataggaataattagcaccagaatagctatggattgcacatgtattctatgtcgtctactggatgaagatgtgacgtacaaaaaaataaaactagaaattgaaacgtgtcacaacttatcaaaacatatagatagacgaggaaacaatgcgctacattgttacgtcttcaataaatgcgatacagacattaagattgttcgactgttactctctcgcggagtcgagagactttgtagaaacaacgaaggattaactccgctaggagcatacagtaagcatagatacgtaaaatctcaaattgtgcatctactgatatccagctattcgaattcctctaacgaactcaagtcgaatataaatgatttcgatctgtattcgtatatgtcttcggataatatcgacttacgtctgctaaaatacctaattgtggataaacggatacgtccgtccaagaatacgaattatgcaatcaatggtctcggattggtggatatatacgtaacgacgcctaatccgagaccagaagtattgctatggcttcttaaatcagaatgttacagcaccggttacgtatttcgtacctgtatgtacgacagtgatatgtgtaagaactctcttcattactatatatcgtctcatagagaatctcaatctctatccaaggatgtaattaaatgtttgatcaataacaatgtttccatccatggcagagacgaaggaggatctttacccatccaatactactggtcttgctcaaccatagatatagagattgttaaattattaataaaggatgtggacacgtgtagagtatacgacgtcagccctatattagaggcggattatctaaacaagcgatttagagtaaccccatataatgtagacatggaaatcgttaatcttcttattgagagacgtcatactcttgtcgacgtaatgcgtagtattacttcttacgattccagagactataaccactacatcatcgataacattctaaagagatttagacaacaggatgaatccatcgtacaagccatgttgataaactacttacattacggcgatatggtcgttcgatgcatgttagataacggacaacaactatcctctgcacgactactttgttaataataatctcgtcgatgtaaacgtcgtaaggtttatcgtggaaaataatggacacatggctgtaaatcacgtatcgaacaatggccgtctatgtatgtacggtctgatattatcgagatttaataattgcgggtatcactgttatgaaaccatactaatagatgtatttgatatactaagcaagtacatggataatatagatatgatcgataatgagaataaaactctactatattacgcggtcgatgtcaataatatacaatttgcaaagcggttattggaatatggagcgagtgttacaacatcacgctcgataatcaatacggccatccagaaaagtagttacagaagagaaaacaaaacgaggatagttgatttattacttagctaccatcccactctagagactatgattgacgcatttaatagagatatacgctatctatatcctgaaccattattcgcctgtatcagatacgccttaatcctagatgatgattttccttctaaagtaagtatgatatctccggtcgtcataaggaactaaagcgctatagagtagacattaatagaatgaagaatgcctacatatcaggcgtctccatgtttgatatattatttaaacgaagcaaacgccacagattgagatacgcaaagaatccgacatcaaatggtacaaaaaagaactaacgtccatcattacagaaactgtaaagaacaatgagaggatcgactccatagtggacaacattaatacagacgataacttgatttcgaaattacccatggagatactttattactccattaaataatttatcatggagcgataatgtcctgtttcatttgtttccatgacatattacaaaatcgattccgtccaagatgataaaaacatttaccggcatcataaacacggagtttattttatatgtctcgcataaacattactaaaaaaatatattgttcggttttctttcacatctttaattatgaaaaagtaaatcattatgagatggacgagattgtacgcatcgttcgcgacagtatgtggtacatacctaacgtatttatggacgacggtaagaatgaaggtcacgtttctgtcaacaatgtttgtcatatgtattttacgttctttgatgtggatacatcgtctcatctgtttaagctagttattaaacactgcgatctgaataaacgaggtaactctccattacattgctatacgatgaatacacgatttaatccatctgtattaaagatattgttacaccacggcatgcgtaactttgatagcaaggatgaaaaaggacatattcctctacaccactatctgattcattcactatcaatcgataacaagatctttgatatactaacggacaccattgatgactttagtaaatcatccgatctattgctgtgttatcttagatataaattcaatgggagcttaaactattacgttctgtacaaaggatccgaccctaattgcgtcgacgaggatggactcacttctcttcattactactgtaaacacatatccacgttctacaaaagcaattattacaagttaagtcacactaagatgcgagccgagaagcgattcatctacgcgataatagattatggagcaaacattaacgcggttacacacttaccttcaacagtataccaaacatagtcctcgtgtggtgtatgctcttttatctcgaggagccgatacgaggatacgtaataatcttgattgtacacccatcatggaacgattgtgcaacaggtcatattctcataatgttactcaattggcacgaacaaaaggaagaaggacaacatctactttatctattcataaaacataatcaaggatacactctcaatatactacggtatctactagataggttcgacattcagaaagacgaatactataataccgcctttcaaaattgtaacaacaatgttgcctcatacatcggatacgacatcaaccttccgactaaagacggtattcgacttggtgtttgaaaacagaaacatcatatacaaggcggatgttgtgaatgacatcatccaccacagactgaaagtatctctacctatgattaaatcgttgttctacaagatgtcagaattctctccctacgacgattactacgtaaaaaagatactagcctactgcctattaagggacgagtcattcgcggaactacatagtaaattctgtttaaacgaggactataaaagtgtatttatgaaaaatatatcattcgataagatagattccatcatcgtgacataagtcgccttaaagagattcgaatctccgacaccgacctgtatacggtatcacagctatcttaaagccatacattcggacagacacatttcatttcccatgtacgacgatctcatagaacagtgccatctatcgatggagcataaaagtaaactcgtcgacaaagcactcaataaattagagtctaccatcggtcaatctagactatcgtatttgcctccggaaattatgcgcaatatcatctaaacagtatgttgtacggaaagaaccattacaaatattatccatgatagaaagaaaatatctatatgattggagaagtaggaaacaggaacaagacgacgattactacattattaaatcatgaagtccgtattatactcgtatatattgtttctctcatgtataataataaacggaagagatatagcaccgcatgcaccatccgatggaaagtgtaaagacaacgaatacaaacgccataatttgtgtccgggaacatacgcttccagattatgcgatagcaagactaacacacgatgtacaccctgtggttcgggtaccttcacatctcgcaataatcatttacccgcttgtctaagttgtaacggaagacgcgatcgtgtaacacgactcacaatagaatctgtgaatgctctcccggatattattgtcttctcaaaggatcatccggatgcaaggcatgtgtttcccaaacaaaatgtggaataggatacggagtatccggagacgtcatctgttctccgtgtggtctcggaacatattctcacaccgtctcttccgcagataaatgcgaacccgtacccagtaatacctttaactatatcgatgtggaaattaatctgtatcccgtcaacgacacgtcgtgtactcggacgaccactaccggtctcagtgaatccatctcaacgtcggaactaactattactatgaatcataaagactgtaatcccgtatttcgtgaggaatacttctctgtccttaataaggtagcaacttcaggtttctttacaggagaaaggtgtgcactctgaatttcgagattaaatgcaataacaaagattcttcctccaaacagttaacgaaagcaaagaatgatgacggtatcatgccgcattcggagacagtaactctagtgggcgactgtatatctagcgtcgacatctatatactatatagtaataccaatactcaagactacgaaactgatacaatctcttatcatgtgggtaatgttctcgatgtcgatagccatatgcccggtagttgcgatatacataaactgatcactaattccaaacccacccgctttttatagtaagtttttcacccataaataataaatacaataattaatttctcgtaaaagtagaaaatatattctaatttattgcatggtaaggaagtagaatcataaagaacagtactcaatcaatagcaattatgaaacaatatatcgtcctggcatgcatgtgcctgccagtcttcagcaatcatcctcatcctcatcctcgtgtacggaagaagaaaacaaacatcatatgggaatcgatgttattatcaaagtcacaaagcaagaccaaacaccgaccaatgataagatttgccaatccgtaacggaaattacagagtccgagtcagatccaaatcccgaggtggaatcagaagatgattccacatcagtcgaggatgtagatcctcctaccacttattactccatcatcggtggaggtctgagaatgaactttggattcaccaaatgtcctcagattaaatccatctcagaatccgctgatggaaacacagtgaatgctagattgtccagcgtgtccccaggacaaggtaaggactctcccgcgatcactcatgaagaagctcttgctatgatcaaagactgtgaggtgtctatcgacatcagatgtagcgaagaagagaaagacagcgacatcaagacccatccagtactcgggtctaacatctctcataagaaagtgagttacgaagatatcatcggttcaacgatcgtcgatacaaaatgtgtcaagaatctagagtttagcgttcgtatcggagacatgtgcaaggaatcatctgaacttgaggtcaaggatggattcaagtatgtcgacggatcggcatctgaaggtgcaaccgatgatacttcactcatcgattcaacaaaactcaaagcgtgtgtctgaatcgataactctattcatctgaaattggatgagtagggttaatcgaacgattcaggcacaccacgaattaaaaaagtgtaccggacactatattccggtttgcaaaacaaaaatgttcttaactacattcacaaaaagttacctctcgcgacttcttctttttctgtctcaatagtgtgatacgattatgacactattcctattcctattcctatttcctttcagggtatcacaaaaatattaaacctctttctgatggtctcataaaaaaagttttacaaaaatatttttattctctttctctctttgatggtctcataaaaaaagttttacaaaaatatttttattctctttctctctttgat

SEQ ID NO: 48 - DNA, 194700 bp, Vaccinia virus
  source 1..194700: mol_type = other DNA
  misc_feature 1..194700: note = VIR94
atcaaagagagaaagagaataaaaatatttttgtaaaactttttttatgagaccatcaaagagagaaagagaataaaaatatttttgtaaaactttttttatgagaccatcagaaagaggtttaatatttttgtgataccctgaaaggaaataggaataggaataggaatagtgtcataatcgtatcacactattgagacagaaaaagaagaagtcgcgagaggtaactttttgtgaatgtagttaagaacatttttgttttgcaaaccggaatatagtgtccggtacacttttttaattcgtggtgtgcctgaatcgttcgattaaccctactcatccaatttcagatgaatagagttatcgattcagacacacgctttgagttttgttgaatcgatgagtgaagtatcatcggttgcaccttcagatgccgatccgtcgacatacttgaatccatccttgacctcaagttcagatgattccttgcacatgtctccgatacgaacgctaaactctagattcttgacacattttgtatcgacgatcgttgaaccgatgatatcttcgtaactcactttcttatgagagatgttagacccgagtactggatgggtcttgatgtcgctgtctttctcttcttcgctacatctgatgtcgatagacacctcacagtctttgatcatagcaagagcttcttcatgagtgatcgcgggagagtccttaccttgtcctggggacacgctggacaatctagcattcactgtgtttccatcagcggattctgagatggatttaatctgaggacatttggtgaatccaaagttcattctcagacctccaccgatgatggagtaataagtggtaggaggatctacatcctcgactgatgtggaatcatcttctgattccacctcgggatttggatctgactcggactctgtaatttccgttacggattggcaaatcttatcattggtcggtgtttggtcttgctttgtgactttgataataacatcgattcccatatgatgtttgttttcttcttccgtacacgaggatgaggatgaggatgattgctgaagactggcaggcacatgcatgccaggacgatatattgtttcataattgctattgattgagtactgttctttatgattctacttccttaccatgcaataaattagaatatattttctacttttacgagaaattaattattgtatttattatttatgggtgaaaaacttactataaaaagcgggtgggtttggaattagtgatcagtttatgtatatcgcaactaccgggcatatggctatcgacatcgagaacattacccacatgataagagattgtatcagtttcgtagtcttgagtattggtattactatatagtatatagatgtcgacgctagatatacagtcgcccactagagttactgtctccgaatgcggcatgataccgtcatcattctttgctttcgttaactgtttggaggaagaatctttgttattgcatttaatctcgaaattcagagtgcacacctttctcctgtaaagaaacctgaagttgctaccttattaaggacagagaagtattcctcacgaaatacgggattacagtctttatgattcatagtaatagttagttccgacgttgagatggattcactgagaccggtagtggtcgtccgagtacacgacgtgtcgttgacgggatacagattaatttccacatcgatatagttaaaggtattactgggtacgggttcgcatttatctgcggaagagacggtgtgagaatatgttccgagaccacacggagaacagatgacgtctccggatactccgtatcctattccacattttgtttgggaaacacatgccttgcatccggatgatcctttgagaagacaataatatccgggagagcattcacagattctattgtgagtcgtgttacacgatcgcgtcttccgttacaacttagacaagcgggtaaatgattattgcgagatgtgaaggtacccgaaccacagggtgtacatcgtgtgttagtcttgctatcgcataatctggaagcgtatgttcccggacacaaattatggcgtttgtattcgttgtctttacactttccatcggatggtgcatgcggtgctatatctcttccgtttattattatacatgagagaaacaatatatacgagtataatacggacttcatgatttaataatgtagtaatcgtcgtcttgttcctgtttcctacttctccaatcatatagatattttctttctatcatggataatatttgtaatggttctttccgtacaacatactgtttagatgatattgcgcataatttccggaggcaaatacgatagtctagattgaccgatggtagactctaatttattgagtgctttgtcgacgagtttacttttatgctccatcgatagatggcactgttctatgagatcgtcgtacatgggaaatgaaatgtgtctgtccgaatgtatggctttaagatagctgtgataccgtatacaggtcggtgtcggagattcgaatctctttaaggcgacttatgtcacgatgatggaatctatcttatcgaatgatatatttttcataaatacacttttatagtcctcgtttaaacagaatttactatgtagttccgcgaatgactcgtcccttaataggcagtaggctagtatcttttttacgtagtaatcgtcgtagggagagaattctgacatcttgtagaacaacgatttaatcataggtagagatactttcagtctgtggtggatgatgtcattcacaacatccgccttgtatatgatgtttctgttttcaaacaccaagtcgaataccgtctttagtcggaaggttgatgtcgtatccgatgtatgaggcaacattgttgttacaattttgaaaggcggtattatagtattcgtctttctgaatgtcgaacctatctagtagataccgtagtatattgagagtgtatccttgattatgttttatgaatagataaagtagatgttgtccttcttccttttgttcgtgccaattgagtaacattatgagaatatgacctgttgcacaatcgttccatgatgggtgtacaatcaagattattacgtatcctcgtatcggctcctcgagataaaagagcatacaccacacgaggactatgtttggtatactgttgaaggtaagtgtgtaaccgcgttaatgtttgctccataatctattatcgcgtagatgaatcgcttctcggctcgcatcttagtgtgacttaacttgtaataattgcttttgtagaacgtggatatgtgtttacagtagtaatgaagagaagtgagtccatcctcgtcgacgcaattagggtcggatcctttgtacagaacgtaatagtttaagctcccattgaatttatatctaagataacacagcaatagatcggatgatttactaaagtcatcaatggtgtccgttagtatatcaaagatcttgttatcgattgatagtgaatgaatcagatagtggtgtagaggaatatgtcctttttcatccttgctatcaaagttacgcatgccgtggtgtaacaatatctttaatacagatggattaaatcgtgtattcatcgtatagcaatgtaatggagagttacctcgtttattcagatcgcagtgtttaataactagcttaaacagatgagacgatgtatccacatcaaagaacgtaaaatacatatgacaaacattgttgacagaaacgtgaccttcattcttaccgtcgtccataaatacgttaggtatgtaccacatactgtcgcgaacgatgcgtacaatctcgtccatctcataatgatttactttttcataattaaagatgtgaaagaaaaccgaacaatatatttttttagtaatgtttatgcgagacatataaaataaactccgtgtttatgatgccggtaaatgtttttatcatcttggacggaatcgattttgtaatatgtcatggaaacaaatgaaacaggacattatcgctccatgataaattatttaatggagtaataaagtatctccatgggtaatttcgaaatcaagttatcgtctgtattaatgttgtccactatggagtcgatcctctcattgttctttacagtttctgtaatgatggacgttagttcttttttgtaccatttgatgtcggattctttgcgtatctcaatctgtggcgtttgcttcgtttaaataatatatcaaacatggagacgcctgatatgtaggcattcttcattctattaatgtctactctatagcgctttagttccttatgacgaccggagatatcatacttactttagaaggaaaatcatcatctaggattaaggcgtatctgatacaggcgaataatggttcaggatatagatagcgtatatctctattaaatgcgtcaatcatagtctctagagtgggatggtagctaagtaataaatcaactatcctcgttttgttttctcttctgtaactacttttctggatggccgtattgattatcgagcgtgatgttgtaacactcgctccatattccaataaccgctttgcaaattgtatattattgacatcgaccgcgtaatatagtagagttttattctcattatcgatcatatctatattatccatgtacttgcttagtatatcaaatacatctattagtatggtttcataacagtgatacccgcaattattaaatctcgataatatcagaccgtacatacatagacggccattgttcgatacgtgatttacagccatgtgtccattattttccacgataaaccttacgacgtttacatcgacgagattattattaacaaagtagtcgtgcagaggatagttgttgtccgttatctaacatgcatcgaacgaccatatcgccgtaatgtaagtagtttatcaacatggcttgtacgatggattcatcctgttgtctaaatctctttagaatgttatcgatgatgtagtggttatagtctctggaatcgtaagaagtaatactacgcattacgtcgacaagagtatgacgtctctcaataagaagattaacgatttccatgtctacattatatggggttactctaaatcgcttgtttagataatccgcctctaatatagggctgacgtcgtatactctacacgtgtccacatcctttattaataatttaacaatctctatatctatggttgagcaagaccagtagtattggatgggtaaagatcctccttcgtctctgccatggatggaaacattgttattgatcaaacatttaattacatccttggatagagattgagattctctatgagacgatatatagtaatgaagagagttcttacacatatcactgtcgtacatacaggtacgaaatacgtaaccggtgctgtaacattctgatttaagaagccatagcaatacttctggtctcggattaggcgtcgttacgtatatatccaccaatccgagaccattgattgcataattcgtattcttggacggacgtatccgtttatccacaattaggtattttagcagacgtaagtcgatattatccgaagacatatacgaatacagatcgaaatcatttatattcgacttgagttcgttagaggaattcgaatagctggatatcagtagatgcacaatttgagattttacgtatctatgcttactgtatgctcctagcggagttaatccttcgttgtttctacaaagtctctcgactccgcgagagagtaacagtcgaacaatcttaatgtctgtatcgcatttattgaagacgtaacaatgtagcgcattgtttcctcgtctatctatatgttttgataagttgtgacacgtttcaatttctagttttatttttttgtacgtcacatcttcatccagtagacgacatagaatacatgtgcaatccatagctattctggtgctaattattcctatttcacgaaaaatgatgaaggcaatcattcctcataagatgataaaaagtgtagtgagagagcatgaaggagatttagtatttagcagtgcggatatgatccaagagggtgagatagtcgttctcgttcagaatctttcgcagcataagtagtatgtcgatatacttatcgttgaagactcttccagagacgatagctgattgagtacaaagtccaatgattgcacgaagttcttcggcggttttcatggagtcatttctgatgaaacatttaatgatctccacgcaattgtcgatattgtcccacggaagtgaatccttcaactcaccaccaaagagctccgttgcatcagttctgaaagagatgagaagcctgtagagagaccctgcgctttctctatgggtccatctatgagaaacccacaggatgtattcagtcagacaatgtctgacgtcggccacggtattcagggagtccttagtagcgtggcaatgacagggtctgaactgggcacaaggagaggccattgtaaaggtagacctgtagccgtttatgctaatagagggctttaatttccatttttttaatgggttgtggatgaggaatgagagtgatatcatattgagatacgtagttatgtagaggtgtatttcctatattatttactttcggtttcatattttaccaactctttaataaatttcttttcacgatgcatcttattaaatgacgttttctcataagtggacatatagatgcagaagtaatgaagaaaagtattacctctatcatctacataattagggtctgctcctttttttaacaacttatacagtacgtagtagtagtttatcggttttaaatcaagtctagaatatatagtggattaatatatttttatattagctaaagctatctatactatcagaaagcatatcattctcaacttcatcatgagttaaatatttgtgtaatggatgtcatgaacattaaacgtattcatgacatactcctttaataggttttttaaaacagatgattcaaatccttcattcattagataacagtgtaacggagtcgtaccttctactagtttgtttatatcacagcattctacaaacagtctaaacaatagagaagacggacagactttaacgtataaatgacacatgttatcgatattcgttgatgaattattattaaacgtagttatgataaatgattctaacgacatctctcgctagagataaaatctagtatcgtatcattaaacatctttgcatcatactcgcatagcatagtttttcataattaatacaatatttaaaagacttattcggaaagtattttaatacatgtatcatcgatggagatccatatgaggagtcacttgtagttcttcagtagtaataacagtgctatcatcgatagtataattatatgtagaaggttcatatgttgttgtaattggagtaactgttggtagttcttccgtggaatcaataattatactaacagcaatagtataattatataaatatgttccgttgatatcacatattttaatgaactcatttctaacaccctcagctatatctgtccaattaaatgtagccaacaatctactacgttctctttgattgactacttgtacggtagcgacgctacactatctttattgtcttctacatgctccaattgaatgtcatgatacaacgcagtttttcttatgcatgtttcataacaccacgaacatgtcgcagtaagatatatagccagagataatttctgtaaattcatgattgccggtcataaacaagcccgtcaataattgtggctatatattcagtttatagagcaaaataattaagcacaatagcgcttaatctcaaaatatgttatgtttatttttttcatattaaacatactggttaaaatcctctaaaggctgatcttcatctataaatcaagatcataattacatttagacagtggtttcatgtttataaaaatgttctttttgtgtgaataaggaatatactaatcaataatcaaccatcgaccccattacgatagtatgcaggcaaccccccattagagaggtacgtgtaatcagtctctccagttttagtatttttataagtcattgttacataaacggcttttaaacagtctcctcgataataagccatatctggaaatttattaaatactcgagtcattttacgcacggtcaaaaaagtaagtaatgtcgacgacttcttacattctatagaaacacctagaatactcattttcttttggaaaatatcctcagactctgatttgaacaatgcacgacctatagtaaaccgtgaccaataagttatattagtcaatggtatatccaaaccatcaggtgtggatagtacgccgatagtccagtctttggtatcgatagtgtagttattgaactgagaagttaccgtatagtctttttggtcatctctaaacaaggaaactaatacctctacactattgaacgatttatcttccgtaatgggtggaataacgggaatataaagtggactagcgatggatgaagtcacgaatataagacacgctattaatccgtatatcatcattttgatattacttataataacgatttgtttaatttttagtttatactattaattgtaaatgatattattatttttttaagtattatcagctttagtttatactattactatttgtaatatttagacatagataaacgtgataaaagtctatttgtttatatttattgcggatagcagtatttccctataaaaagtatacgtcctgtgttgtctttaatcatgtacatgaatggatggtttatgtagaccttcgtacgatataccatcgaaaagttagtcataaatactcctgtaacggccgatgcttctgtatactcctcattaacatctataaacgtcgtatgtagaaatttttctacagtgatagtttcattacacatcttgctaaaatctgcataatatccgaatatattagtaagtcctaaattttctaaaatcggtaccagattatacggttctgtcatttccactttaaactttggcatatacaagtctatacttttagtagataacataccacaccattttttaaatttttcatctgttatatttttttctatgttatatataccttctatgtcgtccggtagtataattaccatactagagtttccctcgtatggaatatcgataatagagaatcctccgaataattcattaatatgtacatattgcaagttattctcggtacccaccatcatatcaacactggtaactatattcttagaaatataaaacttgtctgtatatgtaagatgtttagaaaatggatatttccacattgctttaaaatggacggcgctaacaactgtcatacgagtattaatggatagcggactagtcaataaggaattaattttaccatttgtcatcgtcttaacccattcgttgattagttcctttgtttggttagcattattaaagtttacagtttgaaaatcgtcttttattttttgtaggaaggaggcgtggaactcgatactatcgctaccgtatattttatttgcggtagctagtgtcgcacaatacggaatatctacgtccatgtcattattgtcatccttcttatcatcgggtgtattctcattcatattctctatatattttgatagttgttcagctgtagaaccagctgctccatgatttagaatagataaagtagataaaatagaaactggagaaatcaaaacattttcatcagggtgttttaagattagttctttaaagatatccatggtatagaccaaacaataacgataacgatatatatcataaataaataatgttaaatttcagtttatgtttgtaccccgtattcatacttaacaaattggtattgcgtacacaatcaatcatattacataccattaataatgcaagcataaaaaatcgttagtagatgtttctaaatataggttccgtaagcaaagaatataagaatgaagcggtaatgataaaatcaatcgttatctaaaatgatcatactcatttattttattctattatattaacacatacatttttaacagcaacacattcaatattgtattgttatttttatattatttacacaattaacaatatattattagtttatattactgaattaataatataaaattcccaatcttgtcataaacacacactgagaaacagcataaacacaaaatccatcaaaaatgtcgatgaaatatctgatgttgttgttcgctgctatgataatcagatcattcgccgatagtggtaacgctatcgaaacgacattgccagaaattacaaacgctacaacagatattccagctatcagattatgcggtccagagggagatggatattgtttacacggtgactgtatccacgctagagatatcgacggtatgtattgtagatgctctcatggttatacaggcattagatgtcagcatgtagtattagtagactatcaacgttcagaaaaaccaaacactacaacgtcatatatcccatctcccggtattgtgcttgtattagtaggcattattattatgtgttgtctattatctgtttataggttcactcgaagaactaataaactacctctacaagatatggttgtgccataatttttataaatttttttatgagtatttttacaaaaaaaatgtataaagtgtatgtcttatgtatatttataaaaatgctaagtatgcgatgtatctatgttatttgtatttatctaaacaatacctctacctctagatattatacaaaaattttttatttcggcatattaaagtaaaatctagttaccttgaaaatgaatacagtgggtggttccgtatcaccagtaagaacataatagtcgaatacagtatccgattgagattttgcatacaatactagtctagaaagaaatttgtaatcattttctgtgacgggagtccatatatctgtatcatcgtctagtttatcagtgtcccatgctatatttctgttatcatcattagttaatgaaaataactctcgtgcttcagaaaagtcaaatattgtatccatacatacatctccaaaactatcgcttatacgtttatctttaacgatacctatacctagatggttatttactaacagacattttccagatctattgactataactcctatagtttccacatcaaccaagtaatgatcatctattgttatataacaataacataactcttttccatttttatcagtatgtatatctatatcaacgtcgtcgttgtagtgaatagtagtcattgatctattatatgaaacggatatgtctagaacggcaattgtcttacgtccagttaacactttcgttgatttaaagtctagagtctttgcaaacataatatccttatccgactttatatttcctgtagggtggtataattttattttgcctccacatatcggtgtttccaaatatattactagacaatattccatatagttattagttaagggtacccaattagaacacgtacgcttattatcatcatttggatcgtatttcataaaagttattgtactatcgatgtcaacacattctacattttttaatcgtctatatagtatttttctgatattttctataatatcagaattgtcttccatcggaagttgtatactatcggaatcagttacatgtttaaataattctctgatgtcattccttatacaatcaaattcattattaaacagtttaatagtctgtagacctttatcgtcgtaaatatccattgtcttattagttacgcttatttttatgtgttttacgttgctttattatattttataagaatgattgtttgacgaatcacgagaactattaagacacattattaggtatatattataaaaaagtttttgattacgatgttataagaggaaagaggacacattaacatcatacatcaattaactacattcttataacatcgtaatcaaaagaattgcaattttgatgtataacaactgtcaatgggttatggaattgtatattacatattatacggtatgttggtaacgacaaataccgatcggtaatcgtttgccggtgtaatagaattatatatatctatctattacaccggctgagtatacataataataagttgtggtagtatgatctccatatttataatttaggactttgtattcagtatttttggaatcataaaaaataaaaaaaagttttactaatttaaaatttaaaaagtatttacatttttttcactgtttagtcgcggatatggaattcgatcctgccaaaatcaatacatcatctatagatcatgtaacaatattacaatacatagatgaaccaaatgatataagactaacagtatgcattatccgaaatattaataacattacatattatatcaatatcacaaaaataaatacacatttggctaatcaatttcgggcttggaaaaaacgtatcgccggaagggactatatgactaacttatctagagatacaggaatacaacaatcaaaacttactgaaactatacgtaactgtcaaaaaaatagaaacatatatggtctatatatacactacaatttagttattaatgtggttattgattggataaccgatgtgattgttcaatcaatattaagagggttggtaaattggtacatagctaataatacctatactccaaatacacccaataatacaacaaccatttctgagttggatatcatcaaaatactaaataaatacgaggacgtgtatagagtaagtaaagaaaaagaatgtggaatttgctatgaagttgtttactcaaaacgattagaaaacgatagatactttggtttattggattcgtgtactcatatattttgcataacatgcatcaatatatggcataaaacacgaagagaaaccggtgcgtcggataattgtcctatatgtcgtacccgttttagaaacataacaatgagcaagttctataagctagttaactaataaataaaaagtttaatttgttgacgacgtatgtcgttattttttctcgtataaaagattaatttgattctaatataatctttagtattggataaatatcaattcaaattaattccattagattatatcataaataaaaatagtagcacgcactacttcagccaaatattcttttttgaaacgccatctatcgtagtgaggacacaagtgaacctataatgagcaaatttattagtatcggttacatgaaggactttacgtagagtggtgattccactatctgtggtacgaacggtttcatcttctttgatgccatcacccagatgttctataaacttggtatcctcgtccgatttcatatcctttgccaaccaatacatatagctaaactcaggcatatgttccacacatcctgaacaatgaaattctccagaagatgttacaatgtctagatttggacatttggtttcaaccgcgttaacatatgagtgaacacacccatacatgaaagcgatgagaaataggattttcatcttgccaaaatatcactagaaaaaatttatttatcaattttaaaggtataaaaaatacttattgttgctcgaatattttgtatttgatggtatacggaagattagaaatgtaggtattatcatcaactgattctatggttttatgtattctatcatgtttcactattgcgttggaaataatatcatatgcttccacatatattttattttgttttaactcataatactcacgtaattctggattattggcatatctgtgaataattttagctccatgatcagtaaatattaatgagaacatagtattaccacctaccattatttttttcatttcgttcaattcttgattgcaaagatctatataatcattatagcgttgacttatggactctggaatcttagacgatgtacagtcatctataatcatggcatatttaatacattgttttatagcatagtagttatctacgatgttagatatttctctcaatgaatcaatcacacaatctaatgtaggtttatgacataatagcattttcagcagttcaatgtttctagattcgttgatggcaatggctatacatgtatatccgttatttgatctaatgttgacatctgaaccggattctagcagtaaagatactagagattgtttattatatctaacagccttgtgaagaagtgtttctcctcgtttgtcaatcatgttaatgtctttaagataaggtaggcaaatgtttatagtactaagaattgggcaagcataagacatgtcacaaagaccctttttgtatgtataagtgtagaaattataacatccatagttggatttacataggtgtccaatcgggatctctccatcatcgagatgattgacggcatctcccccttccttttttagtagatatttcatcgtgtaagaatcaatattaatatttctaaagtatccgtgtatagcctctttatttaccacagctccatattccaacatgcattccactaaagggatatcgatatcgccgaatgtcatatactcaattagtatatgttggaggacatccgagttcattgttttcaatatcaaagagatggtttccttatcatttctccatagtggtacaatactacacattattccgtgaggctttccattctccaaaaacaatttgaccaaatctacatctttattgtatctataatcactatttagataatcagccataattcctcgagtgcaacatgttagatcgtctatatatgaataagccgtgttatctattcctttcattaacaatttaacgatgtctatatctatatgagatgacttaatataatattgaagagctgtacaatagtttttatctatagaagacggcttgattccgtgattaattagacatttaacaacttccggacgcacatatgctctcgtatccgactctgaatacagatgagagatgatatacagatgcaatacggtaccgcaatttcgtagttgataatcatcatacgcgtatccgtactcgtcctcataaagaacactgcagccattttctatgaacaaatcaataattttaggaacaggatcattgtcattacataattttctataactgaacgatggttttcacatttaacactcaagtcaaatccatgttctaccaacacctttatcaagtcaacgtctacatttttggatttcatatagctgaatatattaaagtcatttatgttgctaaatccagtggcttctagtagagccatcgctatatcctttaactttaacatgtctactatttgtgtattcttctaatggggtagctgtctccaatttttgcgtaatggattagtgccactgtctagtagtagtttgacgacctcgacattattacaatgctcattaaaaaggtatgcgtgtaaagcattattcttgaattggttcctggtatcattaggatctctgtctctcaacatctgtttaagttcatcgagagccacctcctcattttccaaatagtcaaacattttgactgaatagaagtgaatgagctactgtgaactctatacacccacacaactaatgtcattaaatattatttttttgaatgtatttataccatgtcaaaaacttgtacaattattaataaaaataatttagtgtttaaattttaccagttccagattttacacctccgttaaccccactttttacaccactggacgaccctcctccccacattccaccgccaccagatgtataagttttagatcctttattactaccatcatgtccatggataaagacactccacatgccgccactaccccctttagaagacatattaataagacttaagagttaaggacaagtttaacaataaaattaatcacgagtaccctactaccaacctacactattatatgattatagtttctatttttacagtaccttaactaaagtttctagtcacaagagcaatactaccaacctacactattatatgattatagtttctatttttataggaacgcgtacgagaaaatcaaatgtctaatttctaacggtagtgttgataaacgattatcgtcaatggatacctcctctatcatgtcgtctattttcttactttgttctattaacttattagcattatatattatttgattataaaacttatattgcttattagcccaatctgtaaatatcggattattaacatatcgtttctttgtaggtttatttaacttgtacatcactgtaagcatgtccgtaccatttattttaatttgacgcatatccgcaatttctttttcgcagtcggttataaattctatatatgatggatacatgctacatgtgtacttataatcgactaatatgaagtacttgatacatattttcagtaacgatttattattaccacctatgaataagtacctgtgatcgtctaggtaatcaactgttttcttaatacattcgatggttggtaatttactcagaataatttccaatatcttaatatataattctgctatttctggaatatatttatctgccagtataacacaaatagtaatacatgtaaacccatattttgttattatattaatgtctgcgccattatctattaaccattctactaggctgacactatgcgacttaatacaatgataaagtatactacatccatgtttatctattttgtttatatcatcaatatacggcttacaaagttttagtatcgataacacatccaactcacgcatagagaaggtagggaataatggcataatatttattaggttatcatcattgtcattatctacaactaagtttccattttttaaaatatactcgacaactttaggatctctattgccaaatttttgaaaatatttatttatatgcttaaatctatataatgtagctccttcatcaatcatacatttaataacattgatgtatactgtatgataagatacatattctaacaatagatcttgtatagaatctgtatatcttttaagaattgtggatattaggatattattacgtaaactattacacaattctaaaatataaaacgtatcacggtcgaataatagttgatcaactatataattatcgattttgtgatttttcttcctaaactgtttacgtaaatagttagatagaatattcattagttcatgaccactatagttactatcgaataacgcgtcaaatatttcccgtttaatatcgcatttgtcaagataataatagagtgtggtatgttcacgataagtataataacgcatctctttttcgtgtgaaattaaatagtttatcacgtccaaagatgtagcataaccatcttgtgacctagtaataatataataatagagaactgttttacccattctatcatcataatcagtggtgtagtcgtaatcgtaatcgtctaattcatcatcccaattataatattcaccagcacgtctaatctgttctattttgatcttgtatccatactgtatgttgctacatgtaggtattcctttatccaataatagtttaaacacatctacattgggatttgatgttgtagcgtatttctctacaatattaataccatttttgatactatttatttctatacctttcgaaattagtaatttcaataagtctatatcgatgttatcagaacatagatattcgaatatatcaaaatcattgatatttttatagtcgactgacgacaataacaaaatcacaacatcgtttttgatattattatttttcttggtaacgtatgcctttaatggagtttcaccatcatactcatataatggatttgcaccactttctatcaatgattgtgcactgctggcatcgatgttaaatgttttacaactatcatagagtatcttatcgttaaccatgattggttgttgatgctatcgcattttttggtttctttcatttcagttatgtatggatttagcacgtttgggaagcataagctcatatgatttcagtactgtagtgtcagtactattagtttcgatcagatcaatgtctagatctatagaatcaaaacacgataggtcagaagataatgaatatctgtaggcttcttgttgtactgtaacttctcgttttgttagatggttgcatcgtgctttaacatcaatggtacaaattttatcctcgctttgtgtatcatattcgtccctactataaaattgtatattcagattatcatgagatgtgtatacgctaacggtatcaataaacggagcacaccatttagtcataaccgtaatccaaaaatttttaaagtatatcttaacgaaagaagttgtgtcattgtctacggtgtatggtactagatcctcataagtgtatatatctagagtaatgtttaatttatcaaatggttgataatatggatcctcatggcaatttcctaagacgaaaataagacataaacacgcaataaatctaattgcggacatggttactccttaaaaaaatactaataatcaccttggctatttagtaagtgtcatttaacactatactcatattaatccatggactcataatctctatacgggattaacggatgttctatatacggggatgagtagttctcttctttaactttatactttttactaatcatatttagactgatgtatgggtaatagtgtttgaagagctcgttctcatcatcagaataaatcaatatctctgtttttttgttatacagatgtattacagcctcatatattacgtaatagaacgtgtcatctaccttattaactttcaccgcatagttgtttgcaaatacggttaatcctttgacctcgtcgatttccgaccaatctgggcgtataatgaatctaaactttaatttcttgtaatcattcgaaataatttttagtttgcatccgtagttatcccctttatgtaactgtaaatttctcaacgcgatatctccattaataatgatgtcgaattcgtgctgtatacccatactgaatggatgaacgaataccgacggcgttaatagtaatttactttttcatctttacatattgggtactagttttactatcataagtttataaattccacaagctactatggaataagccaaccatcttagtataacacacatgtcttaaagtttattaattaattacatgttgttttatatatcgctacgaatttaaacagagaaatcagtttaggaaaaaaaattatctatctacatcatcacgtctctgtattctacgatagagtgctactttaagatgagacatatccgtgtcatcaaaaatatactccattaaaatgattattccggcagcgaacttgatattggatatatcacaacctttgttaatatctacgacaatagacagcagtcccatggttccataaacagtgagtttatctttctttgaagagatattttgtagagatcttataaaactgtcgaatgacatcgcatttatatctttagctaaatcgtatatgttaccatcgtaatatctaaccgcgtctatcttaaacgtttccatcgctttaaagacgtttccgatagatggtctcatttcatcagtcatactgagccaacaaatataatcgtgtataacatctttgatagaatcagactctaaagaaaacgaatcggctttattatacgcattcatgataaacttaatgaaaaatgtttttcgttgtttaagttggatgaatagtatgtcttaataattgttattatttcattaattaatatttagtaacgagtacactctataaaaacgagaatgacataactaatcataactagttatcaaagtgtctaggacgcgtaattttcatatggtatagatcctgtaagcattgtctgtattctggagctattttctctatcgcattagtgagttcagaatatgttataaatttaaatcgaataacgaacataactttagtaaagtcgtctatattaactcttttattttctagccatcgtaataccatgtttaagatagtatattctctagttactacgatctcatcgttgtctagaatatcacatactgaatctacatccaattttagaaattggtctgtgttacatatctcttctatattattgttgatgtattgtcgtagaaaactattacgtagaccattttctttataaaacgaatatatagtactccaattatctttaccgatatatttgcacacataatccattctctcaatcactacatctttaagattttcgttgttaagatatttggctaaactatataattctattagatcatcaacagaatcagtatatatttttctagatccaaagacgaactctttggcgtcctctataatattcccagaaaagatattttcgtgttttagtttatcgagatctgatctgttcatatacgccatgattgtacggtacgttatgataaccgcataaaataaaaatccattttcatttttaaccaatactattcataattgagattgatgtaatactttgttactttgaacgtaaagacagtacacggatccgtatctccaacaagcacgtagtaatcaaatttggtgttgttaaacttcgcaatatttatcaatttagatagaaacttatactcatcatctgttttaggaatccatgtattattaccactttccaacttatcattatcccaggctatgtttcgtccatcatcgttgcgcagagtgaataattcttttgtattcggtagttcaaatatataatccatgcatagatcggtaaagctattgtagatgtgatttttcctaaatctaatataaaactcgtttactagcaaacactttcctgatttatcgaccaagacacatatggtttctaaatctatcaagtggtggggatccatagttatgacgcagtaacatagattattaccttcttaactgtcgctaatatctatatatttattgttatcgtattggattctgcatatagatggcttgtatgtcaaagatatagaacacataaccaatttatagtcgcgctttacattctcgaatctaaagttaagagatttagaaaacattatatcctcggatgatgttatcactgtttctggagtaggatatattaaagtctttacagatttcgtccgattcaaataaatcactaaataatatcccacattatcatctgttagagtagtatcattaaatctattatattttatgaaagatatatcactgctcacctctatatttcgtacatttttaaactgtttgtataatatctctctgatacaatcagatatatctattgtgtcggtagacgataccgttacatttgaattaatggtgttccattttacaacttttaacaagttgaccaattcatttctaatagtatcaaacgctccatgattaaatattttaatagtatccattttatatcactacggacacaaagtagctgacataaaccattgtataatttttatgttttatgtttattagcgtacacattttggaagttccggcttccatgtatttcctggagagcaagtagatgatgaggaaccagataggttatatccgtacttgcacttaaagtttacattgtcgttgtatgagtatgatcttttaaacccgctagacaagtatccgtttgatattgtaggatgtggacatttaacaatctgacacgtgggtggatcggaccattctcctcctgaacacaggacaccagagttaccaatcaacgaatatccactattgcaactataagttacaacgcttccatcggtataaaaatcctcgtatccgttatgtcttccgttggatatagatggaggggattggcatttaacagattcacaaataggtgcctcgggattccataccatagatccagtagatcctaattcacaatacgatttagattcaccgatcaaatgatatccgctattacaagagtacgttatactagagccaaagtctactccgccaatatcaagttggccattatcgatatctcgaggcgatgggcatctccgtttaatacattgattaaagagtgtccatccagtacctgtacatttagcatatataggtcccattttttgctttctgtatccaggtagacatagatattctatagtgtctcctatgttgtaattagcattagcatcagtctccacactattcttaaatttcatattaatgggtcgtgacggaatagtacagcatgatagaacgcatcctattcccaacaatgtcaggaacgtcacgctctccaccttcatatttatttatccgtaaaaatgttatcctggacatcgtacaaataataaaaagcccatatatgttcgctattgtagaaattgtttttcacagttgctcaaaaacgatggcagtgacttatgagttacgttacactttggagtctcatctttagtaaacatatcataatattcgatattacgagttgacatatcgaacaaattccaagtatttgattttggataatattcgtattttgcatctgctataattaagatataatcaccgcaagaacacacgaacatctttcctacatggttaaagtacatgtacaattctatccatttgtcttccttaactatatatttgtatagataattacgagtctcgtgagtaattccagtaattacatagatgtcgccgtcgtactctacagcataaactatactatgatgtctaggcatgggagacttttttatccaacgatttttagtgaaacattccacatcgtttaatactacatatttttcatacgtggtataaactccacccattacatatatatcatcgtttacgaataccgacgcgcctgaatatctaggagtaattaagtttggaagtcttatccatttcgaagtgccgtgtttcaaatattctgccacacccgttgaaatagaaaattctaatcctcctattacatataactttccattgttaacacaagtactaacttctgattttaacgacgacatattagtaaccgttttccattttttcgtttcaagatctacccgcgatacggaataaacatgtctattgttaatcatgccgccaataatgtatagacaattatgtaaaacatttgcattatagaattgtctatctgtattaccgactatcgtccaatattctgttctaggagagtaatgggttattgtggatatataatcagagtttttaatgactactatattatgttttataccatttcgtgtcactggctttgtagatttggatatagttaatcccaacaatgatatagcattgcgcatagtattagtcataaacttgggatgtaaaatgttgatgatatctacatcgtttggatttttatgtatccactttaataatatcatagctgtaacatcctcatgatttacgttaacgtcttcgtgggataagatagttgtcagttcatcctttgataattttccaaattctggatcggatgtcaccgcagtaatattgttgattatttctgacatcgacgcattatatagttttttaattccatatcttttagaaaagttaaacatccttatacaatttgtggaattaatattatgaatcatagtttttacacatagatctactacaggcggaacatcaattattatggcagcaactagtatcatttctacattgtttatggtgatgtttatcttcttccagcgcatatagtctaatagcgattcaaacgcgtgatagtttataccattcaatataatcgcttcatcctttagatggtgatcctgaatgcgtttaaaaaaattatacggagatgccgtaataatttccttattcacttgtataatttccccattgatagaaaatatcacgctttccattcttgaagtactataagtaattatagtataatgtaaaggtttatatattcaatattttttataaaaaaatcatttcgacattaattcctttttaaatttccgtctatcatctatagaaacatattctatgaatttataaaatgcttttacgtgtcctatcgtaggcgatagaaccgctaaaaagcctattgaatttctacaaaagaatctattatatggtatagggagagtataaaacattaaatgcccgtacttattaaagtattcagtagccaatcctaactctttcgaatacttattaatggctcttgttctgtacgaatctatttttttgaacaacggacctagtggtatatcttgttctatgtatctaaaataatgtctgactagatccgttagtttaatatcctcagtcatcttgtctagaatggcaaatctaactgcgggtttaggctttagtttagtttttatatctacatctatgtctttatctaacaccaaaaatataatagctaatattttattacaatcatccggatattcttctacgatctcactaactaatgtttctttggttatactagtatagtcactatcggacaaataaagaaaatcagatgatcgatgaataatacatttaaattcatcatctgtaagatttttgagatgtctcattaaaatattattagggtcagtactcattatcattaggcagctattacttattttattatttttcaccatatagatcaatcattagatcatcaaaatatgtttcaatcatcctaaagagtatggtgaatgactcttcccatctaatttctgaacgttcaccaatgtctctagccactttggcactaatagcgatcattcgcttagcgtcttctatattattaactggttgattcaatctatctagcaatggaccgtcggacagcgtcattctcatgttcttaatcaatgtacatacatcgccgtcatctaccaattcatccaacaacataagctttttaaaatcatcattataataggtttgatcgttgtcatttctccaaagaatatatctaataagtagagtcctcatgcttagtaatttaactattttagttaacaactattttttatgttaaatcaattagtacaccgctatgtttaatacttattcatattttagtttttaggattgagaatcaatacaaaaattaatgcatcattaattttagaaatacttagtttccacgtagttaatgaaacatttgaactcatcgtacaagacgttctcgtacaggacgtaactataaaccggtttatatttgttcaagatagatacaaatccgataactttttttacgaattctacgggatccactttaaaagtgtcataccgggttctttttatttttttaaacagatcaatggtgtgatgttgattaggtcttttacgaatttgatatagaatagcgtttacatattctccataatggtcaatcgccatttgttcgtatgtcataaattctttaattatatgacactgtgtattgtttagttcatccttgttcattgttaggaatctatccaaaatggcaattatactagaactataggtgcgttgtatacacatattgatgtgtctgtttatacaatccatgatatttggatccatgctactaccttcgggtaaaattgtagcatcatataccatttctagtactttaggttcattattatccattgcagaggacgtcatgatcgcatcctaaaaaaatatattatttttatgttattttgttaaaaataatcatcgaatacttcgtaagatactccttcatgaacataatcagttacaaaacgtttatatgaagtaaagtatctacgatttttacaaaagtccggatgcataagtacaaagtacgcgataaacggaataataatagatttatctagtctatctttttctatagctttcatagttagatacatggtctcagaagtaggattatgtaacatcagcttcgataaaatgactgggttatttagtcttacacattcgctcatacatgtatgaccgttaactacagagtctacactaaaatgattgaacaatagatagtctaccattgtttcgtattcagatagtacagcgtagtacatggcatcttcacaaattatatcattgtctaatagatatttgacgcatcttatggatcccacttcaacagccatcttaaaatcggtaaaatcatattgctttcctttatcattaataatttctaaaacatcatctctatcataaaagatacaaatattaactgtttgatccgtaataacattgctagtcgatagcaatttgttaataagatgcgctgggctcaatgtcttaataagaagtgtaagaggactatctccgaatttgttttgtttattaacatccgttgatggaagtaaaagatctataatgtctacattcttgactgttttagagcatacaatatggagaggtgtatttccatcatgatctggttttgagggactaattcctagtttcatcatccatgagattgtagaagcttttggattgtctgacataagatgtctatgaatatgatttttgccaaatttatccactatcctggcttcgaatccgatggacattatttttttaaacactctttctgaaggatctgtacacgccaacaacggaccacatccttcttcatcaaccgagttgttaatcttggctccatactgtaccaataaatttattctctctatgacttcatcatctgttcccgagagataatatagaggcgttttatgctgtttatcacacgcgtttggatctgcgccgtgcgtcagcagcatcgcgactattctattattattaattttagaagctatatgcaatggataatttccatcatcatccgtctcatttggagagtatcctctatgaagaagttcttcgacaaatcgttcatctagtcctttaattccacaatacgcatgtagaatgtgataattatttccagaaggttcgatagcttgtagcatattcctaaatacatctaaatttttactattatatttggcataaagagatagataatactcggccgacataatgttgtccattgtagtataaaaattaatatttctatttctatttctgtatatttgcaacaatttactctctataacaaatatcataacttagttcttttatgtcaagaaggcactggtttagttcatctataaatgtcacgccataactaccacgcatgctatactcagaattatgataaagatatttatccttggggtgtaggtaatggggattaatctttgttggatcagtctctaagttaacacatgtcacacatgatccatttatagttatatcacacgatgatgatttatgaattgattccggaagatcgctatcgtattttgtggttccacaattcatttccatacatgttattgtcacactaatattatgatgaactttatctagccgctgagtggtaaacaacagaacagatagtttattatctttaccaacaccctcagccgctgccacaaatctctgatccgtatccatgatggtcatgtttatttctagtccgtatccagtcaacactatgttagcatttctgtcgatatagctttcactcatatgacactcaccaataatagtagaattaatgtcgtaatttacaccaatagtgagttcggcggcaaagtaccaataccggtaatcttgtcgaggaggacatatagtattcttgtattctaccgaatacccgagagatgcgatacaaaagagcaagactaatttgtaaaccatcttactcaaaatatgtaacaatagtacgatgcaatgagtaagacaataggaaatctatcttatatacacataattattctatcaattttaccaattagttagtgtaatgttaacaaaaatgtgggagaatctaattagtttttctttacacaattgacgtacatgagtctgagttccttgtttttgctaattatttcatccaatttattattcttgactatatcgagatcttttgtataggagtcagacttgtattcaacatgcttttctataatcattttagctatttcggcatcatccaatagtacattttccagattagcagaatagatattaatgtcgtatttgaacagagcctgtaacatctcaatgtctttattatctatagccaatttaatgtccggaatgaagagaagggaattattggtgtttgtcgacgtcatatagtcgagcaagagaatcatcatatccacgtgtccattttttatagtggtgtgaatacaactaaggagaatagccagatcaaaagtagatggtatttctgaaagaaagtatgatacaatacttacatcattaagcatgacggcatgataaaatgaagttttccatccagttttcccatagaacatcagtctccaatttttcttaacaaacagttttaccgtttgcatgttaccactatcaaccgcataatacaatgcagtgtttcccttgtcatcaaattgtgaatcatccagtccactgaatagcaaaatctttactattttggtatcttccaatgtggctgcctgatgtaatggaaattcattctctagaagatttttcaatgctccagcgttcaacaacgtacatactagacgcacgttattatcagctattgcataatacaaggcactatgtccatggacatccgccttaaatgtatctttactagagagaaagcttttcagctgcttagacttccaagtattaattcgtgacagatccatgtctgaaacgagacgctaattagtgtatattttttcattttttataattttgtcatattgcaccagaattaataatatctctaatagatctgattagtagatacatggctatcgcaaaacaacatatacacatttaataaaaataatatttattaagaaaattcagatttcacgtacccatcaatataaataaaataatgattccttacaccgtacccatattaaggagattccaccttacccataaacaatataaatccagtaatatcatgtctaatgatgaacacaaatggtgtattaaattccagtttttcaggagatgatctcgccgtagctaccataatagtagatgcctctgctacagttccttgttcgtcgacatctatctttgcattctgaaacattttataaatatataatgggtccctagtcatatgtttaaacgacgcattatctggattaaacatactaggagccatcatttcggctatcgacttaatatccctcttattttcgatagaaaatttagggagtttaagattgtacactttattccctaattgaaacgaccaatagtctaattttgcagccgtaatagaatctgtgaaatgggtcatattatcacctattgccaggtacatactaatattagcatccttatacggaaggcgtaccatgtcatattctttgtcatcgattgtgattgtatttccttgcaatttagtaactacgttcatcatgggaaccgttttcgtaccgtacttattagtaaaactagcattgcgtgttttagtgatatcaaacggatattgccatgtacctttaaaatatatagtattaatgattgcccatagagtattattgtcgagcatattagaatctactacattagacataccggatctacgttctactatagaattaattttattaaccgcatctcgtctaaagtttaatctatataggccgaatctatgatattgttgataatacgacggtttaatacacacagtattatctacgaaactttgataagttagatcagtgtacgtatatttagatgttttcagcttagctaatcctgatattaattctgtaaatgctggacccagatctctttttctcaaatccatagtcttcaataattctattctagtattacctgatgcaggcaatagcgacataaacatagaaaacgaatagccaaacggcgagaagacaatattatcatcttgaatatttttatacgctactataccggcattggtaaatccttgcagacgataggtagacgctgaacacgttaacgatagtatcaataacgcaatcatgattttatggtattaataattaaccttatttttatgttcggtataaaaaaattattgatgtctacacatccttttgtaattgacatctatatatccttttgtataatcaactctaatcactttaacttttacagttttccctaccagtttatccctatattcaacatatctatccatatgcatcttaacactctctgccaagatagcttcagagtgaggatagtcaaaaagataaatatatagagcataatccttctcgtatactctgccctttattacatcgcccgcattgggcaacgaataacaaaatgcaagcatcttgttaacgggctcgtaaattgggataaaaattatgtttttatatctattttattcaagagaatattcaggaatttctttttccggttgtatctcgtcgcagtatatatcatttgtacattgtttcatattttttaatagtttacaccttttagtaggactagtatcgtacaattcatagctgtattttgaattccaatcacgcataaaaatatcttccaattgttgacgaagacctaatccatcatccggtgtaatattaatagatgctccacatgtatccgtaaagtaatttcctgtccaatttgaggtacctatataggccgttttatcggttaccatatatttggcatggtttaccctagaatacggaatgggaggatcagcatctggtacaataaatagctttacttctatatctatgtttttagattttagcatagcgatagatcttaaaaagtttctcatgataaacgaagatcgttgccagcaactaatcaatagcttaacggatacttgtctgtctatagcggatcttcttaattcatcttctatataaggccaaaacaaaattttacccgccttcgaataaataatagggataaagttcataacagatacataaacgaatttactcgcatttctaatacatgacaataaagcggttaaatcattggttctttccatagtacatagttgttgcggcgcagaagcaataaatacagagtgtggaacaccacttacgttaatactaagaggatgatctgtattataatacgacggataaaagtttttccaattatatggtagattgttaactccaagataccagtatacctcaaaaatttgagtgagatccgctgccaagttcctattattgaagatcgcaatacccaattctttgacctgagttagtgatctccaatccatgttagcgcttcctaaataaatatgtgtattatcagatatccaaaattttgtatgaagaactcctcctaggatatttgtaatatctatgtatcgtacttcaactccggccatttgtagtctttcaacatcctttaatggtttgttagatttattgacggctactctaactcttactcctcttttgggtaattgtacaatctcgtttaatattatcgtgccgaaattcgtacccacttcatccgataaactccaataaaaagatgatatatctagtgtttttgtggtattggatagaatttccctccacatgttaaatgtagacaaatatactttatcaaattgcatacctataggaatagtctctgtaatcactgcgattgtattatccggattcattttatttgttaaaaaataatcctatatcacttcactctattaaaaatccaagtttctatttctttcatgactgattttttaacttcatccgtttccttatgaagatgatgtttggcaccttcataaatttttatttctctattacaatttgcatgttgcatgaaataatatgcacctaaaacatcgctaatctcattgtttgttccctggagtatgagagtcgggggggtgttaatcttggaaattatttttctaaccttgttggtagccttcaagacctgactagcaaatccagccttaattttttcatgattgattaatgggtcgtattggtatttataaactttatccatatctctagatactgattctggacatagctttccgactggcgcatttggtgtgatggttcccataagtttggcagctagcagattcagttttgaaacagcatctgcattaactagaggagacattagaatcattgctgtaaacaagtttggattatcgtaagaggctagtatagaaattgttgctcccatggaatgacccaataagtagatttaatagttaccacgtgctgtaccaaagtcatcaatcatcattttttcaccattacttcttccatgtccaatatgatcatgtgagaatactaaaattcctaacgatgatatgttttcagctagttcgtcataacgtccagaatgtttaccagctccatgacttatgaatactaatgccttaggatatgtaataggtttccaatatttacaatatatgtaatcattgtccagattgaacatacagtttgcactcatgattcacgttatataactatcaatattaacagttcgtttgatgatcatattatttttatgttttattgataattgtaaaaacatacaattaaatcaatatagaggaaggagacggatactgtcttttgtgagatagtcatggcgactaaatcagattatgaggatgctgttttttactttgtggatgatgataaaatatgtagtcgcgactccatcatcgatctaatagatgaatatatcacgtggagaaatcatgttatagtgtttaacaaagatattaccagttgtggaagactgtacaaggaattgatgaagttcgatgatgccgctatacagtactatggtattgataaaattaatgagattgtcgaagctatgagcgaaggagaccactacatcaattttacaaaagtccatgatcaggaaagtttattcgctaccataggaatatgtgctaaaatcactgaacattggggatacaaaaagatttcagaatctagattccaatcattgggaaacattacagatctgatgaccgacgataatataaacatcttgatactttttctagaaaaaaaattgaattgatgatataggggtcttcataacgcataattattacgttagcattctatatccgtgttaaaaaaaattatcctatcatgtatttgagagttttatatgtagcaaacatgatagctgtgatgccaataagctttagatattcacgcgtgctagtgttagggatggtattatctggtggtgaaatgtccgttatataatctacaaaacaatcatcgcatatagtatgcgatagtagagtaaacatttttatcgtttctactgggttcatacatcgtctacccaattcggttatgaatgaaattgtcgccaatcttacacccaaacccttgttatccattagcatagtattaacttcgttatttatgtcataaactgtaaatgattctgtagatgccatatcatacatgatattcatgtccctattataatcattactaactttatcacaatatatgttgataatatctatatatgatctagtctttgtgggcaactgtctatacaagtcgtctaaacgttgtttactcatatagtatcgaacagccatcattacatggtcccgttccgttgatagataatcgagtatgttagtggacttgtcaaatctatataccatattttctggaagtggatatacatagtcgtgatcaacattattgctagcctcatcttctatatcctgtactataccattatctatatcatctacataatctacgatattattatacataaacatcgacaacatactattgtcaattatctaagtcctgttgatccaaacccttgatctcctctatctgtactatctagagattgtacttcttccagttctggataatatatacgttgatagattagctgggctattctatcccccgtatttacattaaacgtacattttccattattaataagaataactcctatgtttcccctataatcttcgtctattacaccgcctcctatatcaatgccttttagggacagaccagacctaggagctattctaccatagcagaacttaggcatggacatactaatatctgtcttaattaactgtcgttctccaggagggatagtataatcgtaagcgctatataaatcatatccggcggcgtaaggtgattgcctagtaggagatttagctctgttagtttccttaacaaatctaactggtgagttaatattcatgttgaacataaaactaatattttatttcaaaattatttaccatcccatatattccatgaataagtgtgatgattgtacacttctatagtatctatatacgattcacgataaaatcctcctatcaatagcagtttattatccactatgatcaattctggattatccctcggataaataggatcatctatcagagtccatgtattgctggattcacaataaaattccgcatttctaccaaccaagaataaccttctaccgaacactaacgcgcatgatttataatgaggataataagtggatggtccaaactgccactgatcatgattgggtagcaaatattctgtagttgtatcagtttcagaatgtcctcccattacgtatataacattgtttatagatgccactgctggattacatctaggtttcagaagactcggcatattaacccaagcagcatccccgtggaaccaacgctcaacagatgtgggatttggtagacctcctactacgtataatttattgttagcgggtatcccgctagcatacagtctggggctattcatcggaggaattggaatccaattgtttgatatataatttacagctatagcattgttatgtatttcattgttcatccatccaccgatgagatatactacttctccaacatgagtacttgtacacatatggaatatatctataatttgatccatgttcataggatactctatgaatggatacttgtatgatttgcgtggttgtttatcacaatgaaatattttggtacagtctagtatccattttacattatttatacctctgggagaaagataatttgacctgattacatttttgataaggagtagcagatttcctaatttatttcttcgctttatataccacttaatgacaaaatcaactacataatcctcatctggaacatttagttcatcgctttctagaataagtttcatagatagataatcaaaattgtctatgatgtcatcttccagttccaaaaagtgtttggcaataaagtttttagtatgacataagagattggatagtccgtattctatacccatcatgtaacactcgacacaatattcctttctaaaatctcgtaagataaagtttatacaagtgtagatgataaattctacagaggttaatatagaagcacgtaataaattgacgacgttatgactatctatatatacctttccagtatatgagtaaataactatagaagttaaactgtgaatgtcaaggtctagacaaacccttgtaactggatctttatttttcgtgtatttttgacgtaaatgtgtgcgaaagtaaggagataactttttcaatatcgtagaattgactattatattgccacctatagcatcaataattgttttgaatttcttagtcatagacaatgctaatatattcttacagtacacagtattaacaaatatcggcatttatgtttctttaaaagtcaacatctagagaaaaatgattatctttttgagacataactcccattttttggtattcacccacacgtttttcgaaaaaattagtttttccttccaatgatatattttccatgaaatcaaacggattggtaacattataaatttttttaaatcccaattcagaaatcaatctatccgcgacgaattctatatatgttttcatcatttcacaattcattcctataagtttaactggaagagccgcagtaagaaattcttgttcaatggatactgcatctgttataatagatctaacggtttcttcactcggtggatacaataaatgtttaaacatcaaacatgcgaagtcgcagtgtagaccctcgtctctactaattagttcgttggaaaacgtgagtccgggcattaggccacgctttttaagccaaaatatggaagcgaatgatccggaaaagaagattccttctactgcagcaaaggcaataagtctctctccataaccggcgctgtcatgtatccacttttgagcccaatcggccttcttttttacacaaggcattgtttctatggcattaaagagatagtttttttcattactatctttaacataagtatcgatcaaaagactatacatttccgaatgaatgttttcaatggccatctgaaatccgtagaaacatctagcctcggtaatctgtacttctgtacaaaatcgttccgccaaattttcattcactattccgtcactggctgcaaaaaacgccaatacatgttttataaaatatttttcgtctggtgttagtttattccaatcattgatatctttagatatatctacttcttccactgtccaaaatgatgcctctgcctttttatacatgttccagatgtcatgatattggattgggaaaataacaaatctatttggatttggtgcaaggatgggttccataactaaattaacaatatcaataaattttttttcagttatctatatgcctgtacttggattttttgtacatcgatatcgccgcaatcactacaataattacaagtattattgatagcattgttattagtactatcataattaaattatcgacattcatgggtgctgaataatcgttattatcatcattatcattttgtaattgtgacatcatactaaataaatcgtttgcgagattgttgtgggaagcgggcatggaggatgcattatcattattatttaacgccttccatttggattcacaaatatggcgcgcgttcaacattttatggaaactataattttgtgaaaacagataacaagaaaactcgtcatcgttcaaatttttaacgatagtaaaccgattaaacgtcgagctaatttctaacgctagcgactctgttggatatgggtttccagatatatatcttttcagttcccctacgtatctataatcatctgtaggaaatggaagatatttccatttatctactgttcctaatatcatatgtggtggtgtagtagaaccattaagcgcgaaagatgttatttcgcatcgtattttaacttcgcaataatttctggttagataacgcactctaccagtcaagtcaatgatattagcctttacagatatattcatagtagtcgtaacgatgactccatcttttagatgcgatactcctttgtatgtaccagaatcttcgtacctcaaactcgatatatttaaacaagttaatgagatattaacgcgttttatgaatgatgatatataaccagaagttttatcctcggtggctagcgctataaccttatcattataataccaactagtgtgattaatatgtgacacgtcagtgtgggtacaaatatgtacattatcgtctacgtcgtattcgatacatccgcatacagccaacaaatataaaatgacaaatactctaacgccgttcgtacccatcttgatgcggtttaataaatgttttgatttcaatttattgtaaaaaaagattcggttttatactgttcgatattctcattgcttatattctcatctatcatctccacacagtcaaatccgtggttagcatgcacctcatcaaccggtaaaagactatcggactcttctatcattataactctagaatatttaatttggtcattattaatcaagtcaattatcttatttttaacaaacgtgagtattttactcattttttataaaaacttttagaaatatacagactctatcgtgtgtctatatcttctttttatatccaatgtatttatgtctgatttttcttcatttatcatatataatggtccaaattctacacgtgcttcggattcatccagatcattaaggttcttataattgtaacatccttctcttccctcttctacatcttccttcttattcttattcttagcgtcacagaatctaccacagcaggatcccatgacgagcgtcatattaaactaatccattttcaattataatatatgattagtaatgaccattaaaataaaaaatattcttcataaccggcaagaaagtgaaaagttcacattgaaactatgtcagtagtatacatcatgaaatgatgatatatatatactctattttggtggaggattatatgatataattcgtggataatcattcttaagacacatttcttcattcgtaaatcttttcacgttaaatgagtgtccatattttgcaatttcttcatatgatggcggtgtacgtggacgaggctgctcctgttcttgttgtggtcgccgactgtcgtgtttgcgtttatccctccattatcgcgattgcgtagatggagtactattatataccttgtaattaaatttttttattaattaaacgtataaaaacgttccgtatctgtatttaagagccagatttcgtctaatagaacaaatagctacagtaaaaataactagaataattgctacacccactagaaaccacggatcgtaatacggcaatcggttttcgataataggtggaacgtatattttatttaaggacttaacaattgtctgtaaaccacaatttgcttccgcggatcctgtattaactatctgtaaaagcatatgttggccgggcggagccgaacattctccgatatccaatttctgtatatctataatattattaacctccgcatacgcattacagttcttttctagcttggataccgcactaggtacatcgtctagatctattcctatttcctcagcgatagctcttctatccttttccggaagcaatgaaatcacttcaataaatgattcaaccatgagtgtgaaactaagtcgagaattactcatgcatttgttagttattcggagcgcgcaatttttaaactgtcctataacctctcctatatgaatagcacaagtgacattagtagggatagaatgttgagctaatttttgtaaataactatctataaaaagattatacaaagttttaaactctttagtttccgccatttatccagtctgagaaaatgtctctcataataaatttttccaagaaactaattgggtgaagaatggaaacctttaatctatatttatcacagtctgttttggtacacatgatgaattcttctaatgccgtactaaattcgatatctttttcgatttctggatatgtttttaataaagtatgaacaaagaaatggaaatcgtaataccagttatgtttaactttgaaattgttttttattttcttgttaatgattccagccacttgggaaaagtcaaagtcgtttaatgccgatttaatacgttcattaaaaacaaactttttatcctttagatgaattattattggttcattggaatcaaaaagtaagatattatcgggtttaagatctgcgtgtaaaaagttgtcgcagcatggtagttcgtagattttaatgtataacagagccatctgtaaaaagataaactttatgtattgtaccaaagatttaaatcctaatttgatagctaactcggtatctactttatctgccgaatacagtgctaggggaaaaattataatgtttcctctttcgtattcgtagttagttctcttttcatgttcgaaaaagtgaaacatgcggttaaaatagtttataacattaatattactgttaataactgccgggtaaaagtgggatagtaatttcacgaatttgatactgtcctttctctcgttaaacgcctttagaaaaactttagaagaatatctcaatgatagttcctgaccatccatagtttgtatcaataatagcaacatatgaagaacacgtttatacagagtatgtaaaaatgttaatttatagtttaatcccatggcccacgcacacacgattaattttttttcatctccctttagattgttgtatagaaatttgggtactgtgaactccgccgtagtttccatgggactatataattttgtggcctcgaatacaaattttactacatagttatctatcttaaaaactataccatatcctcctgtagatatgtgataaaaatcgtcgtttataggataaaatcgtttatccttttgttggaaaaaggatgaattaatgtaatcattctcttctatctttagtagtgtttccttattaaaattcttaaaataatttaacaatctaactgacggagcccaattttggtgtaaatctaattgggacattatattgttaaaatacaaacagtctcctaatataacagtatctgataatctatggggagacatccattgatattcaggggatgaatcattggcaacacccatttattgtacaaaaagccccaatttacaaacgaaagtccaggtttgatagagacaaactattaactattttgtctctgtttttaacacctccacagtttttaatttctttagtaatgaaattattcacaatatcagtatcttctttatctaccagagattttactaacttgataaccttggctgtctcattcaatagggtagtaatatttgtatgtgtgatattgatatctttttgaattgtttcttttagaagtgattctttgatggtgccagcatacgaattacaataatgcagaaactcggttaacatgcaggaattatagtaagccaattccaattgttgcctgtgttgtattagagtgtcaatatgagcaatggtgtccttgcgtttctctgatagaatgcgagcagcgattttggcgttatcatttgacgatatttctggaatgacgaatcctgtttctactaactttttggtaggacaaagtgaaacaatcaagaagatagcttctcctcctatttgtggaagaaattgaactcctctagatgatctactgacgatagtatctccttgacagatattggaccgaattacagaagtacctggaatgtaaagccctgaaaccccctcattttttaagcagattgttgccgtaaatcctgcactgtgaccaagatagagagctcctttggtgaatccatctctatgtttcagtttaaccaagaaacagtcagctggtctaaaatttccatctctatctaatacagcatctaacttgatgtcaggaactatgaccggtttaatgttatatgtaacattgagtaaatccttaagttcataatcatcactgtcatcagttatgtacgatccaaacaatgtttctactggcatagtggatacgaagatgctatccatcagaatgtttccctgattagtattttctatatagctattcttctttaaacgattttccaaatcagtaactatgttcatttttttaggagtaggacgcctagccagtatggaagaggattttctagatcctctcttcaacatctttgatctcaatggaatgcaaaaccccatagtgaaacaaccaacgataaaaataatattgtttttcactttttataattttaccatctgactcatggattcattaatatctttataagagctactaacgtataattctttataactgaactgagatatatacaccggatctatggtttccataattgagtaaatgaatgctcggcaataactaatggcaaatgtataaaacaacgaaattatactagagttgttaaagttaatattttctatgagctgttccaataaattatttgttgtgactgcgttcaagtcataaatcatcttgatactatccagtaaacagtctttaagttctggaatattatcatcccattgtaaagcccctaattcgactatcgaatatcctgctctgatagcagtttcaatatcgacggacgtcaatactgtaataaaggtggtagtattgtcatcatcgtgataaactacgggaatatggtcgttagtaggtacggtgactttacacaacgcgatatataactttccttttgtaccatttttaacgtagttgggacgtcctgcagggtattgttttgaagaaatgatatcgagaacagatttgatacgatatttgttggattcctgattattcactataatataatctagacagatagatgattcgataaatagagaaggtatatcgttggtaggataatacatccccattccagtattctcggatactctattgatgacactagttaagaacatgtcttctattctagaaaacgaaaacatcctacatggactcattaaaacttctaacgctcctgattgtgtctcgaatgcctcgtacaaggatttcaaggatgccatagattctttgaccaacgatttagaattgcgtttagcatctgatttttttattaaatcgaatggtcggctctctggtttgctaccccaatgataacaatagtcttgtaaagataaaccgcaagaaaatttatacgcatccatccaaataaccctagcaccatcggatgatattaatgtattattatagattttccatccacaattattgggccagtatactgttagcaacggtatatcgaatagattactcatgtaacctactagaatgatagttcgtgtactagtcataatatctttaatccaatctaagaaatttaaaattagattttttacactgttaaagttaacaaaggtattacccggatacgtggatatcatatatggcattggtccattatcagtaatagctccataaactgatacggcgatggtttttatatgtgtttgatctaacgaggaagaaattcgcgcccacaattcatctctagatatgtatttaatatcaaacggtaacacatcaatttcgggacgcgtatatgtttctaaatttttaatccaaatataatgatgacctatatgccctattatcatactgtcaactatagtacacctagagaacttacgatacatctgtttcctataatcgttaaattttacaaatctataacatgctaaaccttttgacgacaaccattcattaatttctgatatggaatctgtattctcgataccgtattgttctaaagccagtgctatatctccctgttcgtgggaacgctttcgtataatatcgatcaacggataatctgaagtttttggagaataatatgactcatgatctatttcgtccataaacaatctagacataggaattggaggcgatgatcttaattttgtgcaatgagtcgtcaatcctataacttctaatattgtaatattcatcatcgacataacactatctatgttatcatcgtatattagtataccacggccttcttcatttcgtgccaaaataatatacagtcttaaataattacgcaatatctcaatagtttcataattgttagctgttttcatcaaggtttgtatcctgtttaacatgatggcgttctataacgtctctattttctatttttaattttttaaatttttaacgatttactgtggctagatacccaatctctctcaaatatttttttagcctcgcttacaagctgtttatctatactattaaaactgacgaatccgtgattttggtaatgggttccgtcgaaatttgccgaagtgatatgaacatattcgtcgtcgactatcaacaattttgtattattctgaatagtgaaaaccttcacagatagatcattttgaacacacaacgcgtctagacttctggcggttgccatagaatatacgtcgttcttatcccaattaccaactagaagtctgatcttaactcctctattaatggctgcttctataatggagttgtaaatgtcaggccaatagtagctattaccgtcgacacgtgtagtgggaactatggccaaatgttcaatatctatactagtcttagccgacttgagtttatcaataactacatcagtgtctagatctctagaatatcccaataggtgttctggagaatcagtaaagaacactccacctataggattcttaatatgatacgcagtgctaactggcagacaacaagccgcagagcataaattcaaccatgaattttttgcgctattaaaggctttaaaagtatcaaatcttctacgaagatctgtggccagcgggggataatcagaatatacacctaacgttttaatcgtatgtatagatcctccagtaaatgacgcgtttcctacataacatctttcatcatctgacacccaaaaacaaccgagtagtagtcccacattattttttttatctatattaacggttataaaatttatatccgggcagtgactttgtagctctcccagatttcttttccctcgttcatctagcaaaactattattttaatccctttttcagatgcctcttttagtttatcaaaaataagcgcgcccctagtcgtactcagaggattacaacaaaaagatgctatgtatatatatttcttagctagagtgataatttcgttaaaacattcaaatgttgttaaatgatcggatctaaaatccatattttctggtagtgtttctaccagcctacattttgctcccgcaggtaccggtgcaaatggccacatttagttaacataaaaacttatacatcctgttctatcaacgattctagaatatcatcggctatatcgctaaaattttcatcaaagtcgacatcacaacctaactcagtcaatatattaagaagttccatgatgtcatcttcgtttatttctatatccgtatccattgtagattgttgaccgattatcgagtttaaatcattactaatactcaatccttcagaatacaatctgtgtttcattgtaaatttataggcggtgtatttaagttggtagattttcaattatgtatcaatatagcaacagtagttcttgctcctccttgattctagcatcctcttcattattttcttctacgtacataagcatgtccaatacgttagacaacacaccgacgatggcggccgccacagacacgaatatgactagaccgatgaccatttaaaaacccctctctagctttcacttaaactgtatcgattattcttttagaacatgtataatataaaaacattattctatttcgaatttaggcttccaaaaatttttcatccgtaaaccgataataatatatatagacttgttaatagtcggaataaatagattaatgcttaaactatcatcatctccacgattagagatacaatatttacattctttttgctgtttcgaaactttatcaatacacgttaatacaaacccaggaaggagatattgaaactgaggctgttgaaaatgaaacggtgaatacaataattcagataatgtaaaatcatgattccgtattctgatgatattagaactgctaatggatgtcgatggtatgtatctaggagtatctattttaacaaagcatcgatttgctaatatacaattatcattttgattaattgttattttattcatattcttaaaaggtttcatatttatcaattcttctacattaaaaatttccatttttaatttatgtagccccgcaatactcctcattacgtttcattttttgtctataatatccattttgttcatctcggtacatagattatccaattgagaagcgcatttagtagttttgtacattttaagtttattgacgaatcgtcgaaaactagttatagttaacattttattatttgataccctgatattaatacccctgccgttactattatttataactgatgtaacccacgtaacattagaattaattatcgatagtaatgcatcgacgcttccaaaattgtctattataaactcaccgataatttttttattgcatgttttcatattcattaggattatcaaatctttaatcttattacgattgtatgcgttgatattacaagacgtcattctaaaagacggaggatctccatcaaatgccagacaatcacgtacaaagtacatggaaataggttttgttctattgcgcatcatagattcatatagaacacccatagaaatactaatttgttttactctataaaatactaatgcatctatttcatcgttttgtataacgtctttccaagtgccaaattccaaatttttttcattgatagtaccaaattcttctatctctttaactacttgcatagataggtaattacagtgatgcctacatgccgttttttgaaactgaatagatgcgtctagaagcgatgctacactagtcacaatcaccactttcatatttagaatatatgtatgtaaaaatatagtagaatttcattttgtttttttctatgctataaatgaattctcattttgcatctgctcatactccgttttatatcaataccaaagaaggaagatatctggttctaaaagccgttaaagtatgcgatgttagaactgtagaatgcgaaggaagtaaagcttcctgcgtactcaaagtagataaaccctcatcgcccgcgtgtgagagaagaccttcgtccccgtccagatgcgagagaatgaataaccctggaaaacaagtcccgtttatgaggacggacatgctacaaaatatgttcgcggctaatcgcgataatgtagcttctagacttttgtcctaaaatactattatatccttttcgatattaataaatccgtgtcgtccaggttttttatctctttcagtatgtgaatagataggtattttatctctattcatcatcgaatttaagagatccgataaacattgtttgtattctccagatgtcagcatctgatacaacaatatatgtgcacataaacctctggcacttatttcatgtaccttccccttatcactaaggagaatagtatttgagaaatatgtatacatgatattatcatgaattagatatacagaatttgtaacactctcgaaatcacacgatgtgtcggcgttaagatctaatatatcactcgataacacattttcatctagatacactagacattttttaaagctaaaatagtctttagtagtgacagtaactatgcgattattttcatcgatgatacatttcatcggcatattattacgcttaccatcaaagactataccatgtgtatatctaacgtattctagcatggttgccatacgtgcattaaacttttcaggatctttggatagatcttccaatctatctatttgagaaaacatttttatcatgttcaatagttgaaacgtcggatccactatatagatattatctataaagattttaggaactacgttcatggtatcctggcgaatattaaaactatcaatgatatgattatcgttttcatcttttatcaccatatagtttctaagatatgggattttacttaatataatattatttcccgtgataaattttattagaaaggccaaatctataagaaaagtcctagaattagtctgaagaatatctatatcgccgtaccgtatatttggattaattagatatagagaatatgatccgtaacatatacaacttttattatggcgtctaagatattcttccatcaacttattaacatttttgactagggaagatacattatgacgtcccattacttttgccttgtctattactgcgacgttcatagaatttagcatatctcttgccaattcttccattgatgttacattataagaaattttagatgaaattacatttggagctttaatagtaagaactcctaatatgtccgtgtatgtggtcactaatacagattgtagttctataatcgtaaataatttacctatattatatgtttgagtctgtttagaaaagtagctaagtatacgatcttttatttctgatgcagatgtatcaacatcggaaaaaaatctttttttattcttttttactaaagatacaaatatgtctttgttaaaaacagttattttctgaatatttctagcttgtaattttaacatatgatattcgttcacactaggtactctgcctaaataggtttctataatctttaatgtaatattaggaagagtattctgatcaggattcctattcattttgaggatttaaaactctgattattgtctaatatggtctcaacacaaactttttcacagagcgatagagtttttgataactcgtttttcttaagaaatataaaactactgtttccagagctcgctctatcttttattttatctaattcgatacaaactcctgatactggttcagaaagtaattcattaattttcagtcctttatagaagatatttaatatagataatacaaaattttcagttcttgatatcgatctgattgatcctagaactagatatattaataacgtgctcattaggcagtttatggcagcttgataattagatatagtatattccagttcatatttattagataccgcattgcccagattttgatattctatgaattcctctgaaaataaatccaaaataactagacattctattttttgtggattagtgtactctcttccctctatcatgttcactactggtgtccacgatgataaatatctagagggaatataatatagtccataggatgccaatctagcaatgtcgaataactgtaatttgattcttcgttcttcattatgaattgattcttgaggtataaacctaacacaaattatattattagacttttcgtatgtaatgtctttcatgttataagtttttaatcctggaatagaatctattttaatgaggcttttaaacgcagagttctccaacgagtcaaagcataatactctgttgtttttcttatatacgatgttacgattttcttctttgaatggaataggtttttgaattagtttataattacaacataatagataaggaagtgtgcaaatagtacgcggaaaaaacataatagctcccctgttttcatccatggttttaagtaaatgatcactggcttctttagtcaatggatattcgaacattaaccgtttcatcatcattggacagaatccatatttcttaatgtaaagagtgatcaaatcattgtgtttattgtaccatcttgttgtaaatgtgtattcggttatcggatctgctcctttttctattaaagtatcgatgtcgatctcgtctaagaattcaactatatcgacatatttcatttgtatacacataaccattactaacgtagaatgtataggaagagatgtaacgggaacagggtttgttgattcgcaaactattctaatacataattcttctgttaatacgtcttgcacgtaatctattatagatgccaagatatctatataattattttgtaagatgatgttaactatgtgatctatataagtagtgtaataattcatgtatttcgatatatgttccaactctgtctttgtgatgtctagtttcgtaatatctatagcatcctcaaaaaatatattcgcatatattcccaagtcttcagttctatcttctaaaaaatcttcaacgtatggaatataataatctattttacctcttctgatatcattaatgatatagtttttgacactatcttctgtcaattgattcttattcactatatctaagaaacggatagcgtccctaggacgaactactgccattaatatctctattatagcttctggacataattcatctattataccagaattaatgggaactattccgtatctatctaacatagttttaagaaagtcagaatctaagacctgatgttcatatattggttcatacatgaaatgatctctattgatgatagtgactatttcattctctgaaaattggtaactcattctatatatgctttccttgttgatgaaggatagaatatactcaatagaatttgtaccaacaaactgttctcttatgaatcgtatatcatcatctgaaataatcatgtaaggcatacatttaacaattagagacttgtctcctgttatcaatatactattcttgtgataatttatgtgtgaggcaaatttgtccacgttctttaattttgttatagtagatatcaaatccaatggagctacagttcttggcttaaacagatatagtttttctggaacgaattctacaacattattataaaggactttgggtagataagtgggatgaaatcctattttaattaatgcgatagccttgtcctcgtgcagatatccaaacgcttttgtgatagtatggcattcattgtctagaaacgctctacgaatatctgtgacagatatcatctttagagaatatactagtcgcgttaatagtactacaatttgtattttttaatctatctcaataaaaaaattaatatgtatgattcaatgtataactaaactactaactgttattgataactagaatcagaatctaatgatgacgtaaccaagaagtttatctactgccaatttagctgcattatttttagcatctcgtttagattttccatctgccttatcgaatactcttccgtcgatgtctacacaggcataaaatgtaggagagttactaggccccactgattcaatacgaaaagaccaatctctcctagtaatttggcagtactcattaataacggtgacagggttagcacctttccaatcaataatttttttagccggaataacatcatcaaaagacttatgatcctctctcattgatttttcgcgggatacatcatctattatggcgtcagccataacatcagcatccggcttatccgcctccgttgtcataaaccaacgaggaggaatatcgtcggagctgtacaccatagcactacgttgaagatcgtacagagctttattaacttctcgcttctccatattaagttgtctagttagttgtgcagcagtagctccttcgattccaatggttttaatagcctcacacacaatctctgcgttagaacgttcgtcgatatagattttagacatttttagagagaactaacacaaccagcaataaaactgaacctactttatcatttttttattcatcatcctctggtggttcgtcgttcctatcgaatgtggatctgattaacccgtcatctataggtgatgctggttctggagattctggaggagatggattattatctggaagaatctctgttatttccttgttttcatgtatcgattgcgttgtaacattaagattgcgaaatgctctaaatttgggaggcttaaagtgttgtttgcaatctctacacgcatgtctaactagtggaggttcgtcagcggctctagtttgaatcatcatcggcgtagtattcctacttttacagttaggacacggtgtattgtatttctcgtcgagaacgttaaaataatcgttgtaactcacatcctttattttatctatattgtattctactcctttcttaatgcattttataccgaataagagatagcgaaggaattctttttcggtgccgctagtacccttaatcatatcacatagtgttttatattccaaatttgtggcaatagacggtttatttctatacgatagtttgtttctggaatcctttgagtattctataccaatattattctttgattcgaatttagtttcttcgatattagattttgtattacctatattcttgatgtagtactttgatgatttttccatggcccattctattaagtcttccaagttggcatcatccacatattgtgatagtaattctcggatatcagtagcggctaccgccattgatgtttgttcattggatgagtaactactaatgtatacattttccatttataacacttatgtattaactttgttcatttatattttttcattattatgttgatattaacaaaagtgaatatatatgttaataattgtattgtggttatacggctacaatttcataatgagtggaagtcagtgtccgatgatcaatgacgatagctttactctgaaaagaaagtatcaaatcgatagtgcggagtcaacaataaaaatggataagaagaggataaagtttcagaatagagccaaaatggtaaaagaaataaatcagacaataagagcagcacaaactcattacgagacattgaaactaggatacataaaatttaagagaatgattaggactactactctagaagatatagcaccatctattccaaataatcagaaaacttataaactattctcggacatttcagccatcggcaaagcatcacagaatccgagtaagatggtatatgctctgctgctttacatgtttcccaatttgtttggagatgaccatagattcattcgttatagaatgcatccaatgagtaaaatcaaacacaagatcttctctcctttcaaacttaatcttattagaatattagtggaagaaagattctataataatgaatgcagatctaataaatggagaataattggaacacaagttgataaaatgttgatagctgaatctgataaatatacaatagatgcaaggtataacctaaaacccatgtatagaatcaagggaaaatctgaagaagataccctcttcatcaaacagatggtagaacaatgtgtgacatcccaggaattggtggaaaaagtgttgaagatactgtttagagatttgttcaagagtggagaatacaaagcatacagatacgatgatgatgtagaaaatggatttattggattggatacactaaaattaaacattgttcatgatatagttgaaccatgtatgcctgttcgtaggccagtggctaagatactgtgtaaagaaatggtaaataaatactttgagaatccgctacatattattggtaaaaatcttcaagagtgcattgactttgttagtgaataggcatttcatctttctccaatactaattcaaattgttaaattaataatggatagtataaatagttattagtgataaaatagtaaaaataattattagaataagagtgtagtatcatagataactctcttctataaaaatggattttattcgtagaaagtatcttatatacacagtagaaaataatatagattttttaaaggatgatacattaagtaaagtaaacaattttaccctcaatcatgtactagctctcaagtatctagttagcaattttcctcaacacgttattactaaggatgtattagctaataccaatttttttgttttcatacatatggtacgatgttgtaaagtgtacgaagcggttttacgacacgcatttgatgcacccacgttgtacgttaaagcattgactaagaattatttatcgtttagtaacgcaatacaatcgtacaaggaaaccgtgcataaactaacacaagatgaaaaatttttagaggttgccgaatacatggacgaattaggagaacttataggcgtaaattatgacttagttcttaatccattatttcacggaggggaacccatcaaagatatggaaatcatttttttaaaactgtttaagaaaacagacttcaaagttgttaaaaaattaagtgttataagattacttatttgggcatacctaagcaagaaagatacaggcatagagtttgcggataatgatagacaagatatatatactctatttcaacaaactggtagaatcgtccatagcaatctaacagaaacgtttagagattatatctttcccggagataagactagctattgggtgtggttaaacgaaagtatagctaatgatgcggatatcgttcttaatagacacgccattaccatgtatgataaaattcttagttatatatactctgagataaaacaaggacgcgttaataaaaacatgcttaagttagtttatatctttgagcctgaaaaagatatcagagaacttctgctagaaatcatatatgatattcctggagatatcctatctattattgatgcaaaaaacgacgattggaaaaaatattttattagtttttataaagctaattttattaacggtaatacatttattagtgatagaacgtttaacgaggacttattcagagttgttgttcaaatagatcccgaatatttcgataatgaacgaattatgtctttattctctacgagtgctgcggacattaaacgatttgatgagttagatattaataacagttatatatctaatataatttatgaggtgaacgatatcacattagatacaatggatgatatgaagaagtgtcaaatctttaacgaggatacgtcgtattatgttaaggaatacaatacatacctgtttttgcacgagtcggatcccatggtcatagagaacggaatactaaagaaactgtcatctataaaatccaagagtagacggctgaacttgtttagcaaaaacattttaaaatattatttagacggacaattggctcgtctaggtcttgtgttagatgattataaaggagacttgttagttaaaatgataaaccatcttaagtctgtggaggatgtatccgcattcgttcgattttctacagataaaaaccctagtattcttccatcgctaatcaaaactattttagctagttataatatttccatcatcgtcttatttcaaaggtttttgagagataatctatatcatgtagaagaattcttggataaaagcatccatctaaccaagacggataagaaatatatacttcaattgataagacacggtagatcatagaacagaccaaatatattattaataatttgtatatacatagatataattatcacatattaaaaattcacacatttttgataaatgggaactgctgcaacaattcagactcccaccaaattaatgaataaagaaaatgcagaaatgattttggaaaaaattgttgatcatatagttatgtatattagtgacgaatcaagtgattcagaaaataatcctgaatatattgattttcgtaacagatacgaagactatagatctctcattataaaaagtgatcacgagtttgtaaagctatgtaaaaatcatgcagagaaaagttctccagaaacgcaacaaatgattatcaaacacatatacgaacaatatcttattccagtatctgaagtactattaaaacctataatgtccatgggtgacataattacatataacggatgtaaagacaatgaatggatgctagaacaactctctaccctaaactttaacaatctccgcacatggaactcatgtagcataggcaatgtaacgcgtctgttttatacattttttagttatctgatgaaagataaactaaatatataagtataatcccattctaatactttaacctgatgtattacctgcatcttattagaatattaacctaactaaaagacataacataaaaactcattacatagttgataaaaagcggtaggatataaatattatggctgccaccgttccgcgttttgacgacgtgtacaaaaatgcacaaagaagaattctagatcaagaaacattttttagtagaggtctaagtagaccgttaatgaaaaacacatatctatttgataattacgcgtatggatggataccagaaactgcaatttggagtagtagatacgcaaacttagatgcaagtgactattatcccatttcgttgggattacttaaaaagttcgagtttctcatgtctctatataaaggtcctattccagtatacgaagaaaaagtaaatactgaattcatagccaatggatcgttctctggtagatacgtatcatatcttcgaaagttttctgctcttccaacaaacgagtttattagttttttgttactgacttccattccaatctataatatcttgttctggtttaaaaatactcagtttgatattactaaacacacattattcagatacgtctatacagataatgccaaacacctggcgttggctaggtatatgcatcaaacaggagactataagcctttgtttagtcgtctcaaagagaattatatatttaccggtcccgttccaataggtatcaaagatatagatcaccctaatcttagtagagcaagaagtccatccgattatgagacattagctaatattagtactatattgtactttaccaagtatgatccggtattaatgtttttattgttttacgtacctgggtattcaattactacaaaaattactccagccgtagaatatctaatggataaactgaatctaacaaagagcgacgtacaactgttgtaaattattttatgcttcgtaaaatgtaggttttgaaccaaacattctttcaaagaatgagatgcataaaactttattatccaatagattgactatttcggacgtcaatcgtttaaagtaaacttcgtaaaatattctttgatcactgccgagtttaaaacttctatcgataattgtctcatatgttttaatatttacaagttttttggtccatggtacattagccggacaaatatatgcaaaataatatcgttctccaagttctatagtttctggattatttttattatattcagtaaccaaatacatattagggttatctgcggatttataatttgagtgatgcattcgactcaacataaataattctagaggagacgatctactatcaaattcggatcgtaaatctgtttctaaagaacggagaatatctatacatacctgattagaattcatccgtccttcagacaacatctcagacagtctggttttgtacatcttaatcatattcttatgaaacttggaaacatctcttctagtttcactagtacctttattaattctctcaggtacagattttgaattcgacgatgccgagtatttcatcgttgtatatttcttcttcgattgcataatcagattcttatataccgcctcaaactctattttaaaattattaaacaatactctactattaatcagtcgttctaactctttcgctatttctatagacttatctacatcttgactgtctatctctgtaaacacggagtcggtatctccatacacgctacgaaaacgaaatctgtaatctataggcaacgatgttttcacaatcggattaatatctctatcgtccatataaaatggattacttaatggattggcaaaccgtaacataccgttagataactctgctccatttagtaccgattctagatacaagatcattctacgtcctatggatgtgcaactcttagccgaagcgtatgagtatagagcactatttctaaatcccatcagaccatatactgagttggctactatcttgtacgtatattgcatggaatcataaatggccttttcagttgaactggtagcctgttttaacatctttttatatctggctctctctgccaaaaatgttcttaatagtctaggaatggttccttctatcgatctatcgaaaattgctatttcagagatgaggttcggtagtctaggttcacaatgaaccgtaatatatctaggaggtggatatttctgaagcaatagctgattatttatttcttcttccaatctattggtactaacaacgacaccgactaatgtttccggagatagatttccaaagatacacacattaggatacagactgttataatcaaagattaatacattattactaaacattttttgttttggagcaaataccttaccgccttcataaggaaacttttgttttgtttctgatctaactaagatagttttagtttccaacaatagctttaacagtggacccttgatgactgtactcgctctatattcgaataccatggattgaggaagcacatatgttgacgcacccgcgtctgtttttgtttctactccataatactcccacaaatactgacacaaacaagcatcatgaatacagtatctagccatatctaaagctatgtttagattataatccttatacatctgagctaaatcaacgtcatcctttccgaaagataatttatatgtatcattaggtaaagtaggacataatagtacgactttaaatccattttcccaaatatctttacgaattactttacatataatatcctcatcaacagtcacataattacctgtggttaaaacctttgcaaatgcagcggctttgcctttcgcgtccgtagtatcgtcaccgatgaacgtcatttctctaactcctctatttaatactttacccatgcaactgaacgcgttcttggatatagaatccaatttgtacgaatccaatttttcagatttttgaatgaatgaatatagatcgaaaaatatagttccattattgttattaacgtgaaacgtagtattggccatgccgcctactcccttatgactagactgatttctctcataaatacagagatgtacagcttcctttttgtccggagatctaaagataatcttctctcctgttaataactctagacgattagtaatatatctcagatcaaagttatgtccgttaaaggtaacgacgtagtcgaacgttagttccaacaattgtttagctattcgtaacaaaactatttcagaacatagaactagttctcgttcgtaatccatttccattagtgactgtatcctcaaacatcctctatcgacggcttcttgtatttcctgttccgttaacatctcttcattaatgagcgtaaacaataatcgtttaccacttaaatcgatataacagtaacttgtatgcgagattgggttaataaatacagaaggaaacttcttatcgaagtgacactctatatctagaaataagtacgatcttgggatatcgaatctaggtatttttttagcgaaacagttacgtggatcgtcacaatgataacatccattgttaatctttgtcaaatattgctcgtccaacgagtaacatccgtctggagatatcccgttagaaatataaaaccaactaatattgagaaattcatccatggtggcattttgtatgctgcgtttctttggctcttctatcaaccacatatctgcgacggagcattttctatctttaatatctagattataacttattgtctcgtcaatgtctatagttctcatctttcccaacggcctcgcattaaatggaggaggagacaatgactgatatatttcgtccgtcactacgtaataaaagtaatgaggaaatcgtataaatacggtctcaccatttcgacatctggatttcagatataaaaatctgttttcaccgtgactttcaaaccaattaatgcaccgaacatccatttatagaatttagaaatatattttcatttaaatgaatcccaaacattggggaagagccgtatggaccattatttttatagtactttcgcaagcgggtttagacggcaacatagaagcgtgtaaacgaaaactatatactatagtcagcactcttccatgtcctgcatgtagacggcacgcgactatcgctatagaggacaataatgtcatgtctagcgatgatctgaattatatttattattttttcatcagattatttaacaatttggcatctgatcccaaatacgcgatcgatgtgacaaaggttaaccctttataaacttaacccattataaaacttatgattagtcacaactgaaataaccgcgtgattattttttggtataattctacacggcatggtttctgtaactatgaattcaacccccgttacattagtgaaatctttaacaaacagcaagggttcgtcaaagacataaaactcattgtttacaatcgaaatagaccccctatcacacttaaaataaaaaatatccttatcctttaccaccaaataaaattctgattggtcaatgtgaatgtattcacttaacagttccacaaatttatttattaactccgaggcacatacatcgtcggtattttttatggcaaactttactcttccagcatccgtttctaaaaaaatattaacgagttccatttatatcatccaatattattgaaatgacgttgatggacagatgatacaaataagaaggtacggtacctttgtccaccatctcctccaattcatgctctattttgtcattaactttaatgtatgaaaacagtacgccacatgcttccatgacagtgtgtaacactttggatacaaaatgtttgacattagtataattgttcaagactgtcaatctataatagatagtagctataatatattctatgatggtattgaagaagatgacaaccttggcatattgatcatttaacacagacatggtatcaacagatagcttgaatgaaagagaatcagtaattggaataagcgtcttctcgatagagtgtccgtataccaacatgtctgatattttgatgtattccattaaattatttagttttttctttttattttcgttaaacagcatttctgtcaacggaccccaacatcgttgaccgattaagttttgattgatttttccgtgtaatgcgtatctagtcagatcgtatagcctatccaataatccatcatctgtgcgtagatcacatcgtacactttttaattctctatagaagagcgacagacatctggagcaattacagacagcaatttctttattctctacagatgtaagatacttgaagacattcctatgatgatgcagaattttggataacacggtattgatggtatctgttaccataattcctttgatggctgatagtgtcagagcacaagatttccaatctttgacaatttttagcaccattatctttgttttgatatctatatcagacagcatggtgcgtctgacaacacagggattaagacggaaagatgaaatgattctctcaacatcttcaatggataccttgctattttttctggcattatctatatgtgcgagaatatcctctagagaatcagtatcctttttgatgatagtggatctcaatgacatgggacgtctaaaccttcttattttatcaccagattgcatggtgatttgtcttctttcttttatcataatgtaatctctaaattcatcggcaaattgtctatatctaaaatcataatatgagatgtttacctctacaaatatctgttcgtccaatgttagagtatctacatcagttttgtattccaaattaaacatggcaacggatttaattttatattcctctattaagtcctcgtcgataataacagaatgtagataatcatttaatccatcgtacatggttggaagatgcttgttgacaaaatctttaattgtcttgatgaaggtgggactatatctaacatcttgattaataaaatttataacattgtccataggatactttgtaactagttttatacacatctcttcatcggtaagtttagacagaatatcgtgaacaggtggtatattatattcatcagatatacgaagaacaatgtccaaatctatattgtttaatatattatatagatgtagcgtagctcctacaggaatatctttaactaagtcaatgatttcatcaaccgttagatctattttaaagttaatcatataggcattgatttttaaaaggtatgtagccttgactacattctcattaattaaccattccaagtcactgtgtgtaagaagattatattctatcataagcttgactacatttggtcccgataccattaaagaattcttatgatataaggaaacagcttttaggtactcatctactctacaagaattttggagagccttaacgatatcagtgacgtttattatttcaggaggaaaaaacctaacattgagaatgtcggagttaatagcttccagatacagtgattttggcaatagtccgtgtaatccataatccagtaacacgagctggtgcttgctagacaccttttcaatgtttaatttttttgaaataagctttgataaagccttcctcgcaaattccggatacatgaacatgtcggcgacatgattaagtattgttttttcattatttttatattttctcaacaagttctcaataccccaatagatgatagaatatcacccaatgcgtccatgttgtctatttccaacaggtcgctatatccaccaatagaagtttttccaaaaaagattctaggaacagttctaccaccagtaatttgttcaaaatagtcacgcaattcattttcgggtttaaattctttaatatcgacaatttcatacgctcctcttttgaaactaaacttatttagaatatccagtgcatttctacaaaaaggacatgtatacttgacaaaaattgtcactttgttattggccaacctttgttgtacaaattcctcggccattttaatatttaagtgatataaaactatctcgacttatttaactctttagtcgagatatatggacgcagatagctatatgatagccaactacagaaggcaaacgctataaaaaacataattacgacgagcatatttataaatatttttattcagcattacttgatatagtaatattaggcacagtcaaacattcaaccactctcgatacattaactctctcattttctttaacaaattctgcaatatcttcgtaaaaagattcttgaaactttttagaatatctatcgactctagatgaaatagcgttcgtcaacatactatgttttgtatacataaaggcgcccattttaacagtttctagtgacaaaatgctagcgatcctaggatcctttagaatcacatagattgacgattcgtctctcttagtaactctagtaaaataatcatacaatctagtacgcgaaataatattatccttgacttgaggagatctaaacaatctagttttgagaacatcgataagttcatcgggaatgacatacatactatctttaatagaactcttttcatccagttgaatggattcgtccttaaccaactgattaatgagatcttctattttatcattttccagatgatatgtatgtccattaaagttaaattgtgtagcgcttctttttagtctagcagccaatactttaacatcactaatatcgatatacaaaggagatgatttatctatggtattaagaattcgtttttcgacatctgtcaaaaccaattcctttttgcctgtatcatccagttttccatcctttgtaaagaaattattttctactagactattaataagactgataaggattcctccataattgcacaatccaaactttttaacaaaactagactttacaagatctacaggaatgcgtacttcaggtttcttagcttgtgattttttcttttgtggacattttcttgtgaccaactcatctaccatttcattgattttagcagtgaaataagctttcaatgcacgggcactgatactattgaaaacgagttgatcttcaaattccgccatttaagttcaccaaacaacttttaaatacaaatatatcaatagtagtagaataagaactataaaaaaaataataattaaccaataccaaccccaacaaccggtattattagttgatgtgactgttttctcatcacttagaacagatttaacaatttctataaagtctgtcaaatcatcttccggagaccccataaatacaccaaatatagcggcgtacaacttatccatttatacattgaatattggcttttctttatcgctatcttcatcatattcatcatcaatatcaacaagtcccagattacgagccagatcttcttctacattttcagtcattgatacacgttcactatctccagagagtccgataacgttagccaccacttctctatcaatgattagtttcttgagtgcgaatgtaatttttgtttccgttccggatctatagaaaactacaggtgtgataattgccttggccaattgtctttctcttttactgagtgattctagttcaccttctatagatctgagaatggatgattctccagtcgaaacatattctaccatggatccgtttaatttgttgatgaagatggattcatccttaaatgttttctctgtaatagtttccaccgaaagactatgcaaagaatttggaatgcgttccttgtgcttaatgtttccatagacggcttctagaagttgatacaacataggactagccgcggtaacttttatttttagaaagtatccatcgcttctatcttgtttagatttatttttataaagtttagtctctccttccaacataataaaagtggaagtcatttgactagataaactatcagtaagttttatagagatagacgaacaattagcgtattgagaagcatttagtgtaacgtattcgatacattttgcattagatttactaatcgattttgcatactctataacacccgcacaagtctgtagagaatcgctagatgcagtaggtcttggtgaagtttcaactctcttcttgattaccttactcatgattaaacctaaataattgtactttgtaatataatgatatatattttcactttatctcatttgagaataaaaatgtttttgtttaaccactgcatgatgtacagatttcggaatcgcaaaccaccagtggttttattttatccttgtccaatgtgaattgaatgggagcggatgcgggtttcgtacgtagatagtacattcccgtttttagaccgagactccatccgtaaaaatgcatactcgttagtttggaataactcggatctgctatatggatattcatagattgactttgatcgatgaaggctcccctgtctgcagccatttttatgatcgtcttttgtggaatttcccaaatagttttataaactcgcttaatatcttctggaaggtttgtattctgaatggatccaccatctgccataatcctattcttgatctcatcattccataattttctctcggttaaaactctaaggagatgcggattaactacttgaaattctccagacaatactctccgagtgtaaatattactggtatacggttccaccgactcattatttcccaaaatttgagcagttgatgcagtcggcataggtgccaccaataaactatttctaagaccgtatgttctgattttatcttttagaggttcccaattccaaagatccgacggtacaacattccaaagatcatattgtagaataccgttactggcgtacgatcctacatatgtatcgtatggtccttccttctcagctagttcacaactcgcctctaatgcaccgtaataaatggtttcgaagatcttcttatttagatcttgtgcttccaggctatcaaatggataatttaagagaataaacgcgtccgctaatccttgaacaccaataccgataggtctatgtctcttattagagatttcagcttctggaataggataataattaatatctataattttattgagatttctgacaattactttgaccacatccttcagtttgagaaaatcaaatcgcccatctattacaaacatgttcaaggcaacagatgccagattacaaacggctacctcattagcatccgcatattgtattatctcagtgcaaagattactacacttgatagttcctaaattttgttgattactctttttgttacacgcatccttataaagaatgaatggagtaccagtttcaatctgagattctataatcgctttccagacgactcgagcctttattatagatttgtatctcctttctctttcgtatagtgtatacaatcgttcgaactcgtctccccaaacattgtccaatccaggacattcatccggacacatcaacgaccactctccgtcatccttcactcgtttcataaagagatcaggaatccaaagagctataaatagatctctggttctatgttcctcgtttcctgtattctttttaagatcgaggaacgccataatatcagaatgccacggttccaagtatatggccataactccaggccgtttgtttcctccctgatctatgtatctagcggtgttattataaactctcaacattggaataataccgtttgatataccattggtaccggagatatagcttccactggcacgaatattactaattgatagacctattccccctgccattttagagattaatgcgcatcgttttaacgtgtcatagataccctctatgctatcatcgatcatgttaagtagaaaacagctagacatttggtgacgactagttcccgcattaaataaggtaggagaagcgtgcgtaaaccatttttcagaaagtagattgtacgtctcaatagctgagtctatatcccattgatgaattcctactgcgacacgcattaacatgtgctgaggtctttcaacgatcttgttgtttattttcaacaagtaggatttttccaaagttttaaaaccaaaatagttgtatgaaaagtctcgttcgtaaataataaccgagttgagtttatccttatatttgttaactatatccatggtgatacttgaaataatcggagaatgtttcccatttttaggattaacatagttgaataaatcctccatcacttcactaaatagtttttttgtttccttgtgtagatttgatacggctattctggcggctagaatggcataatccggatgttgtgtagtacaagtggctgctatttcggctgccagagtgtccaattctaccgttgttactccattatatattccttgaataaccttcatagctattttaataggatctatatgatccgtgtttaagccataacataattttctaatacgagacgtgattttatcaaacatgacattttccttgtatccatttcgtttaatgacaaacatttttgttggtgtaataaaaaaattatttaacttttcattaatagggatttgacgtatgtagcgtacaaaattatcgttcctggtatatagataaagagtcctatatatttgaaaatcgttacggctcgattaaactttaatgattgcatagtgaatatatcattaggatttaactccttgactatcagggcggcaccagaaattaccatcaaaagcattaatacagttatgccgatcgcagttagaacggttatagcatccaccatttatatctaaaaattagatcaaagaatatgtgacaaagtcctagttgtatactgagaattgacgaaacaatgtttcttacatatttttttcttattagtaactgacttaatagtaggaactggaaagctagacttgattattctataagtatagatacccttccaaataatattctctttgataaaagttccagaaaatgtagaattttttaaaaagttatcttttgctattaccaagattgtgtttagacgcttattattaatatgagtgatgaaatccacaccgcctctagatatcgcttttatttccacattagatggtaaatccaatagtgaaactatctttttaggaatgtatggactcgcgtttagaggagtgaacgtcttaggcgtcggaaaggatgattcatcaaacgaataaacaatttcacaaatggatgttaatgtattagtaggaaattttttgacgctagtggaattgaagattctaatggatgatgttctacctatttcatccgataacatgttaatttccgacaccaacggttttaatatttcgatgatatacggtagtctctctttcggacttatatagcttattccacaatacgagtcattatatactccaaaaaacaaaataactagtataaaatctgtatcgaatgggaaaaacgaaattatcgacataggtatagaatctggaacattgaacgtattaatacttaattctttttctgtggtaagtaccgataggttattgacattgtatggttttaaatattctataacttgagacttgatagatattagtgatgaattgaaaattatttttatcaccacgtgtgtttcaggatcatcgtcgacgcccgtcaaccaaccgaatggagtaaaataaatatcattaatatatgctctagatattagtatttttatcaatcctttgattatcatcttctcgtaggcgaatgattccatgatcaagagtgatttaagaacatcctccggagtattaatgggcttagtaaacagtccatcgttgcaataataaaagttatccaagttaaaggatattatgcattcgtttaaagatatcacctcatctgacggagacaattttttggtaggttttagagactttgaagctacttgtttaacaaagttattcatcgtcgtttactattctatttaattttgtagttaatttatcacatatcacattaattgactttttggtccatttttccatacgtttatattcttttaatcctgcgttatccgtttccgttatatccagggatagatcttgcaagttaaatagaatgctcttaaataatgtcatttttttatccgctaaaaatttaaagaatgtataaacttttttcaaagatttaaaacttttaggtggagttctagtacacaatatcataaacaaactaataaacatcccgcattcagattccaacagctgattaacttccacattaatacagcctattttcgctccaaatgtacattcgaaaaatctgaataaaacatcgatgtcacaatttgtattatccaatacagaatgtctgtgattcgtgttaaaaccatcggagaaggaatagaaataaaaattattatagtggtggaattcagttggaatattgcctccggagtcataaaaggatactaaacattgttttttatcataaattacacatttccaatgagacaaataacaaaatccaaacattacaaatctagaggtagaacttttaattttgtctttaagtatatacgataagatatgtttattcataaacgcgtcaaatttttcatgaatcgctaaggagtttaagaatctcatgtcaaattgtcctatataatccacttcggatccataagcaaactgagagactaagttcttaatacttcgattgctcatccaggctcctctctcaggctctattttcatcttgacgacctttggattttcaccagtatgtattcctttacgtgataaatcatcgattttcaaatccatttgtgagaagtctatcgccttagatactttttcccgtagtcgaggtttaaagaaatacgctaacggtatactagtaggtaactcaaagacatcatatatagaatggtaacgcgtctttaactcgtcggttaactctttcttttgatcgagttcgtcgctactattgggtctgctcaggtgccccgactctactagttccaacatcataccgataggaatacaagacactttgccagcggttgtagatttatcatatttctccactacatatccgttacaatttgttaaaaatttagatacatctatattgctacataatccagctagtgaatatatatgacataataaattggtaaatcctagttctggtattttactaattactaaatctgtatatctttccatttatcatggaaaagaatttaccagatatcttcttttttccaaactgcgttaatgtattctcttacaaatattcacaagatgaattcagtaatatgagtaaaacggaacgtgatagtttctcattggcggtgtttccagttataaaacatagatggcataacgcacacgttgtaaaacataaaggaatatacaaagttagtacagaagcacgtggaaaaaaagtatctcctccatcactaggaaaacccgcacacataaacctaaccgcgaagcaatatatatacagtgaacacacaataagctttgaatgttatagttttctaaaatgtataacaaatacagaaatcaattcgttcgatgagtatatattaagaggactattagaagctggtaatagtttacagatattttccaattccgtaggtaaacgaacagatactataggtgtactagggaataagtatccatttagcaaaattccattggcctcattaactcctaaagcacaacgagagatattttcagcgtggatttctcatagacctgtagttttaactggaggaactggagtgggtaagacgtcacaggtacccaagttattgctttggtttaattatttatttggtggattctctactctagataaaatcactgactttcacgaaagaccagtcattctatctcttcctaggatagctttagttagattgcatagcaataccattttaaaatcattgggatttaaggtactagatggatctcctatttctttacggtacggatctataccggaagaattaataaacaaacaaccaaaaaaatatggaattgtattttctacccataagttatctctaacaaaactatttagttatggcactcttattatagacgaagttcatgagcatgatcaaataggagatattattatagcagtagcgagaaagcatcatacgaaaatagattctatgtttttaatgactgccacgttagaggatgacagggaacggctaaaagtatttttacctaatcccgcatttatacatattcctggagatacactgtttaaaattagcgaggtatttattcataataagataaatccatcttccagaatggcatacatagaagaagaaaagagaaatttagttactgctatacagatgtatactcctcctgatggatcatccggtatagtctttgtggcatccgttgcacagtgtcacgaatataaatcatatttagaaaaaagattaccgtatgatatgtatattattcatggtaaggtcttagatatagacgaaatattagaaaaagtgtattcatcacctaatgtatcgataattatttctactccttatttggaatccagcgttactatacacaatgttacacacatttatgatatgggtagagtttttgtccccgctccttttggaggatcgcaacaatttatttctaaatctatgagagatcaacgaaaaggaagagtaggaagagttaatcctggtacatacgtctatttctatgatctgtcttatatgaagtctatacagcgaatagattcagaatttctacataattatatattgtacgctaataagtttaatctaacactccccgaagatttgtttataatccctacaaatttggatattctatggcgtacaaaggaatatatagactcgttcgatattagtacagaaacatggaataaattattatccaattattatatgaagatgatagagtatgctaaactttatgtactaagtcctattctcgctgaggagttggataactttgagaggacgggagaattaactagtattgtacgagaagccattttatctctaaatttacgaattaagattttaaattttaaacataaagatgatgatacgtatatacacttttgtaaaatattattcggtgtctataacggaacaaacgctactatatattatcatagacctctaacgggatatatgaatatgatttcagatactatatttgttcctgtagataataactaaaaatcaaactctaatgaccacatctttttttagagatgaaaaattttctacatctccttttgtagacacgactaaacattttgcagaaaaaagtttattagtgtttagataatcgtatacttcatcagtgtagatagtaaatgtgaacagataaaaggtattcttgctcaatagattggtaaattccatagaatatattaatcctttcttcttgagatcccacatcatttcaaccagagacgttttatccaatgatttacctcgtactataccacatacaaaactagattttgcagtgacgtcgtacctggtattcctaccaaacaaaattttacttttagttcttttagaaaattctaaggtagaatctctatttgccaatatgtcatctatggaattaccactagcaaaaaatgatagaaatatatattgatacatcgcagctggttttgatctactatactttaaaaacgaatcagattccataattgcctgtatatcatcagctgaaaaactatgttttacacgtattccttcggcatttctttttaatgatatatcttgtttagacaatgataaagttatcatgtccatgagagacgcgtctccgtatcgtataaatatttcattagatgttagacgcttcattaggggtatacttctataaggtttcttaatcagtccatcattggttgcgtcaagaactactatcggatgttgttgggtatctctagtgttacacatggccttactaaagtttgggtaaataactatgatatctctattaattatagatgcatatatttcattcgtcaaggatattagtatcgacttgctatcgtcattaatacgtgtaatgtaatcatataaatcatgcgatagccaaggaaaatttaaatagatgttcatcatataatcgtcgctataattcatattaatacgttgacattgactaatttgtaatatagcctcgccacgaagaaagctctcgtattcagtttcatcgataaaggataccgttaaatataactggttgccgatagtctcatagtctattaagtggtaagtttcgtacaaatacagaatccctaaaatattatctaatgttggattaatctttaccataactgtataaaatggagacggagtcataactattttaccgtttgtacttactggaatagatgaaggaataatctccggacatgctggtaaagacccaaatgtctgtttgaagaaatccaatgttccaggtcctaatctcttaacaaaaattacgatattcgatcccgatatcctttgcattctatttaccagcatatcacgaactatattaagattatctatcatgtctattctcccaccgttatataaatcgcctccgctaagaaacgttagtatatccatacaatggaatacttcatttctaaaatagtattcgttttctaattctttaatgtgaaatcgtatactagaaagggaaaaattatctttgagttttccgttagaaaagaaccacgaaactaatgttctgattgcgtccgattccgttgctgaattaatggatttacaccaaaaactcatataacttctagatgtagaagcattcgctaaaaaattagtagaatcaaaggatataagtagatgttccaacaagtgagcaattcccaagatttcatctatatcattctcgaatccgaaattagaaattcccaagtagatatcctttttcatccgatcgttgatgaaaatacgaactttattcggtaagacaatcatttactaaggagtaaaataggaagtaatgttcgtatgtcgttatcatcgtataaattaaaggtgtgttttttaccattaagtgacattataattttaccaatattggaattataatataggtgtatttgcgcactcgcgacggttgatgcatcggtaaatatagctgtatctaatgttctagtcggtatttcatcatttcgctgtctaataatagcgttttctctatctgtttccattacagctgcctgaagtttattggtcggataatatgtaaaataataagaaatacatacgaataacaaaaataaaataagatataataaagatgccatttagagatctaattttgttcaacttgtccaaattcctacttacagaagatgaggaatcgttggagatagtgtcttccttatgtagaggatttgaaatatcttatgatgacttgataacttactttccagataggaaataccataaatatatttataaagtatttgaacatgtagatttatcggaggaattaagtatggaattccatgatacaactttgcgagatttagtttatcttagattgtacaagtattccaagtgtatacggccgtgttataaattaggagataatctaaaaggcatagttgttataaaggacaggaatatttatattagggaagcaaatgatgacttgatagaatatctcctcaaggaatacactcctcagatttatacatattctaatgagcgcgtccccataactggttcaaaattaattctttgtggattttctcaagttacatttatggcgtatacaacgtcgcatataacaacaaataaaaaggtagatgttctcgtttccaaaaaatgtatagatgaactagtcgatccaataaattatcaaatacttcaaaatttatttgataaaggaagcggaacaataaacaaaatactcaggaagatattttattcggtaaccggtggccaaactccataggtagctttttctatttcggattttagaatttccaaattcaccagcgatttatcggttttggtgaaatccaaggatttattaatgtccacaaatgccatttgttttgtctgtggattgtatttgaaaatggaaacgatgtagttagatagatgcgctgcgaagtttcctattagggttccgcgcttcacgtcacccagcatacttgaatcaccatcctttaaaaaaaatgataagatatcaacatggagtatatcatactcggattttaattcttctactgcatcactgacattttcacaaatactacaatacggtttaccgaaaataatcagtacgttcttcatttatgggtatcaaaaacttaaaatcgttactgctggaaaataaatcactgacgatattagatgataatttatacaaagtatacaatggaatatttgtggatacaatgagtatttatatagccgtcgccaattgtgtcagaaacttagaagagttaactacggtattcataaaatacgtaaacggatgggtaaaaaagggagggcatgtaaccctttttatcgatagaggaagtataaaaattaaacaagacgttagagacaagagacgtaaatattctaaattaaccaaggacagaaaaatgctagaattagaaaagtgtacatccgaaatacaaaatgttaccggatttatggaagaagaaataaaggcaaaaatgcaattaaaaatcgataaacttacatttcaaatatatttatctgattctgataacataaaaatatcattgaatgagatactaacacatttcaacaataatgagaatgttacattattttattgtgatgaacgagacgcagaattcgttatgtgtctcgaggctaaaacacatttctctaccacaggagaatggccgttgataataagtaccgatcaggatactatgctatttgcatctactgataatcatcctaagatgataaaaaacttaactcaactgtttaaatttgttccctcggcagaggataactatttagcaaaattaacggcgttagtgaatggatgtgatttctttcctggactctatggggcatctataacacccaccaacttaaacaaaatacaattgtttagtgattttacaatcgataatatagtcactagtttggcaattaaaaattattatagaaagactaactctaccgtagacgtgcgtaatattgttacgtttataaacgattacgctaatttagacgatgtctactcgtatgttcctccttgtcaatgcactgttcaagaatttatattttccgcattagatgaaaaatggaatgaatttaaatcatcttatttagagaccgttccgttaccctgtcaattaatgtacgcgttagaaccacgtaaggagattgatgtttcagaagttaaaactttatcatcttatatagatttcgaaaatactaaatcagatatcgatgttataaaatctatatcctcgatttttggatattctaacgaaaactgtaacacgatagtattcggcatctataaggataatttactactgagtataaataattcattttactttaacgatagtctgttaataaccaatactaaaagtgataatataataaatataggttactagattaaaaatggtgttccaactcgtgtgctctacatgcggtaaagatatttctcacgaacgatataaattgattatacgaaaaaaatcattaaaggatgtactcgtcagtgtaaagaacgaatgttgtaggttaaaattatctacacaaatagaacctcaacgtaacttaacagtgcaacctctattggatataaactaatatggatccggttaattttatcaagacatatgcgcctagaggttctattatttttattaattataccatgtcattaacaagtcatttgaatccatcgatagaaaaacatgtgggtatttattatggtacgttattatcggaacacttggtagttgaatctacctatagaaaaggagttcgaatagtcccattggatagtttttttgaaggatatcttagtgcaaaagtatacatgttagagaatattcaagttatgaaaatagcagctgatacgtcattaactttattgggtattccgtatggatttggtcatgatagaatgtattgttttaaattggtagctgactgttataaaaatgccggtgttgaaacatcgtctaaacgaatattaggtaaagatatttttctgagccaaaacttcacagacgataatagatggataaagatatatgattctaataatttaacattttggcaaattgattaccttaaagggtgagttaatatgcataactactcctccgttgttttttccctcgttctttttcttaacgttgtttgccatcactctcataatgtaaagatattctaaaatggtaaacttttgcatatcggacgcagaaattggtataaatgttgtaattgtattatttcccgtcaatggactagtcacagctccatcagttttatatcctttagagtatttctcactcgtgtctaacattctagagcattccatgatctgtttatcgttgatattggccggaaagatagattttttattttttattatattactattggcaattgtagatataacttctggtaaatatttttctaccttttcaatctcttctattttcaagccggctatatattctgctatattgttgctagtatcaataccttttcttgctaagaagtcatatgtggtattcactatatcagttttaactggtagttccattagcctttccacttctgcagaataatcagaaattggttctttaccagaaaatccagctactataataggctcaccgatgatcattggcaaaatcctatattgtaccagattaatgagagcatatttcatttccaataattctgctagttcttgagacattgatttatttgatgaatctagttggttctctagatactctaccatttctgccgcatacaataacttgttagataaaatcagggttatcaaagtgtttagcgtggctagaatagtgggcttgcatgtattaaagaatgcggtagtatgagtaaaccgttttaacgaattatatagtctccagaaatctgtggcgttacatacatgagccgaatgacatcgaagattgtccaatatttttaatagctgctctttgtccattatttctatatttgactcgcaacaattgtagataccattaatcactgattcctttttcgatgccggacaatagcacaattgtttagctttggactctatgtattcagaattaatagatatatctcttaatacagattgcactatacattttgaaactatgtcaaaaattgtagaacgacgctgttctgcagccatttaactttaaataatttacaaaaatttaaaatgagcatccgtataaaaatcgataaactgcgccaaattgtggcatatttttcagagttcagtgaagaagtgtctataaatgtagactcgacggatgagttaatgtatatttttgccgccttgggcggatctgtaaacatttgggccattatacctctcagtgcatcagtgttctaccgcggagccgaaaatattgtgtttaatcttccggtgtccaaggtaaaatcgtgtttgtgtagttttcacaatgatgccatcatagatatagaacctgatctggaaaataatctagtaaaactttctagttatcatgtagtaagtgtcgattgtaacaaggaactgatgcctattaggacagatactactatttgtctaagtatagatcaaaagaaatcttacgtgtttaattttcacaagtatgaagaaaaatgttgtggtagaaccgtcattcatttagaatggttgttgggctttatcaagtgtattagtcagcatcagcatttggctattatgtttaaagatgacaatattattatgaagactcctggtaatactgatgcgttttccagggaatattctatgactgaatgttctcaagaactacaaaagttttctttcaaaatagctatctcgtctctcaacaaactacgaggattcaaaaagagagtcaatgtttttgaaactagaatcgtaatggataatgacgataacattctaggaatgttgttttcggatagagttcaatcctttaagatcaacatctttatggcgtttttagattaatactttcaatgagataaatatgggtggcggagtaagtgttgagctccctaaacgggatccgcctccgggagtacccactgatgagatgttattaaacgtggataaaatgcatgacgtgatagctcccgctaagcttttagaatatgtgcatataggaccactagcaaaagataaagaggataaagtaaagaaaagatatccagagtttagattagtcaacacaggacccggtggtctttcggcattgttaagacaatcgtataatggaaccgcacccaattgctgtcgcacttttaatcgtactcattattggaagaaggatggaaagatatcagataagtatgaagagggtgcagtattagaatcgtgttggccagacgttcacgacactggaaaatgcgatgttgatttattcgactggtgtcagggggatacgttcgatagaaacatatgccatcagtggatcggttcagcctttaataggagtgatagaactgtagagggtcaacaatcgttaataaatctgtataataagatgcaaacattatgtagtaaagatgctagtgtaccaatatgtgaatcatttttgcatcatttacgcgcacacaatacagaagatagcaaagagatgatcgattatattctaagacaacagtctgcggactttaaacagaaatatatgagatgtagttatcccactagagataagttagaagagtcattaaaatatgcggaacctcgagaatgttgggatccagagtgttcgaatgccaatgttaatttcttactaacacgtaattataataatttaggactttgcaatattgtacgatgtaatactagcgtgaacaacttacagatggataaaacttcctcattaagattgtcatgtggattaagcaatagtgatagattttctactgttcccgtcaatagagcaaaagtagttcaacataatattaaacattcgttcgacctaaaattgcatttgatcagtttattatctctcttggtaatatggatactaattgtagctatttaaatgggtgccgcggcaagcatacagacgacggtgaatacactcagcgaacgtatctcgtctaaattagaacaagaagcgaacgctagtgctcaaacaaaatgtgatatagaaatcggaaatttttatatccgacaaaaccatggatgtaacctcactgttaaaaatatgtgctctgcggacgcggatgctcagttggatgctgtgttatcagccgctacagaaacatatagtggattaacaccggaacaaaaagcatacgtgccagctatgtttactgctgcgttaaacattcagacaagtgtaaacactgttgttagagattttgaaaattatgtgaaacagacttgtaattctagcgcggtcgtcgataacaaattaaagatacaaaacgtaatcatagatgaatgttacggagccccaggatctccaacaaatttggaatttattaatacaggatctagcaaaggaaattgtgccattaaagcgttgatgcaattgacgactaaggccactactcaaatagcacctagacaagttgctggtacaggagttcagttttatatgattgttatcggtgttataatattggcagcgttgtttatgtactatgccaagcgtatgctgttcacatccaccaatgataaaatcaaacttattttagccaataaggaaaacgtccattggactacttacatggacacattctttagaacttctccgatggttattgctaccacggatatacaaaactgaaaatatattgataatattttaatagattaacatggaagttatcgctgatcgtctagacgatatagtgaaacaaaatatagcggatgaaaaatttgtagattttgttatacacggtctagagcatcaatgtcctgctatacttcgaccattaattaggttgtttattgatatactattatttgttatagtaatttatatttttacggtacgtctagtaagtagaaattatcaaatgttgttggtggcgctagtcatcacattaactattttttattactttatactataatagtactagactgacttctaacaaacatctcacctgccataaataaatgcttgatattaaagtcttctatttctaacactattccatctgtggaaaataatactctgacattatcgctaattgacacatcggtgagtgatatgcctataaagtaataatcttctttgggcacatataccagtgtaccaggttctaacaacctatttactggtgctcctgtagcatactttttctttaccttgagaatatccatcgtttgcttggtcaatagcgatatgtgattttttatcaaccactcgaaaaagtaattggagtgttcatatcctctacgggctattgtctcatggccgtgtatgaaatttaagtaacacgactgtggtagatttgttctatagagccggttgccgcaaatagatagaactaccaatatgtctgtacaaatgttaaacattaattgattaacagaaaaaacaatgttcgttctgggaatagaaaccagatcaaaacaaaattcgttagaatatatgccacgtttatacattgaatataaaataactacagtttgaaaaataacagtatcatttaaacatttaacttgcggggttaatctcacaactttactgtttttaaactgttcaaaatatagcatcgatccatgagaaatacgtttagccgcctttaatagaggaaatcccaccgcctttctggatctcaccaacgacgatagttctgaccagcaactcatttcttcatcatccacctgttttaacatataataggcaggagatagatatccgtcattgcaatattccttctcgtaggcacacaatctaatattgataaaatctccattctcttctctgcatttattatcttgtttcggtggctgattaggctgtagtcttggtttaggctttggtatatcgttgttgaatctattttggtcattaaatctttcatttcttcctggtatatttttatcacctcgtttggttggatttttgtctatattatcgtttgtaacatcggtacgggtattcatttatcacaaaaaaaacttctctaaatgagtctactgctagaaaacctcatcgaagaagataccatattttttgcaggaagtatatctgagtatgatgatttacaaatggttattgccggcgcaaaatccaaatttccaagatctatgctttctatttttaatatagtacctagaacgatgtcaaaatatgagttggagttgattcataacgaaaatatcacaggagcaatgtttaccacaatgtataatataagaaacaatttgggtctaggagatgataaactaactattgaagccattgaaaactatttcttggatcctaacaatgaagttatgcctcttattattaataatacggatatgactgccgtcattcctaaaaaaagtggtaggagaaagaataagaacatggttattttccgtcaaggatcatcacctatcttgtgtattttcgaaactcgtaaaaagattaatatttataaagaaaatatggaatccgcatcgactgagtatacacctatcggagacaacaaggctttgatatctaaatatgcgggaattaatatcctaaatgtgtattctccttccacatccataagattgaatgccatttacggattcaccaataaaaataaactagagaaacttagtactaataaggaactagaatcgtatagttctagccctcttcaagaacccattaggttaaatgattttctgggactattggaatgtgttaaaaagaatattcctctaacagatattccgacaaaggattgattactataaatggagaatgttcctaatgtatactttaatcctgtgtttatagagcccacgtttaaacattctttattaagtgtttataaacacagattaatagttttatttgaagtattcgttgtattcattctaatatatgtattttttagatctgaattaaatatgttcttcatgcctaaacgaaaaatacccgatcctattgatagattacgacgtgctaatctagcgtgtgaagacgataaattaatgatctatggattaccatggatgacaactcaaacatctgcgttatcaataaatagtaaaccgatagtgtataaagattgtgcaaagcttttgcgatcaataaatggatcacaaccagtatctcttaacgatgttcttcgcagatgatgattcattttttaagtatttggctagtcaagatgatgaatcttcattatctgatatattgcaaatcactcaatatctagactttctgttattattattgatccaatcaaaaaataaattagaagccgtgggtcattgttatgaatctctttcagaggaatacagacaattgacaaaattcacagactttcaagattttaaaaaactgtttaacaaggtccctattgttacagatggaagggtcaaacttaataaaggatatttgttcgactttgtgattagtttgatgcgattcaaaaaagaatcctctctagctaccaccgcaatagatcctattagatacatagatcctcgtcgcgatatcgcattttctaacgtgatggatatattaaagtcgaataaagtgaacaataattaattctttattgtcatcatgaacggcggacatattcagttgataatcggccccatgttttcaggtaaaagtacagaattaattagacgagttggtacctgcagcggccgctcgagagctcggaggtaatgatatgtatcaatcggtgtgtagaaagtgttacatcgactcataatattatattttttatctaaaaaactaaaaataaacattgattaaattttaatataatacttaaaaatggatgttgtgtcgttagataaaccgtttatgtattttgaggaaattgataatgagttagattacgaaccagaaagtgcaaatgaggtcgcaaaaaaactaccgtatcaaggacagttaaaactattactaggagaattattttttcttagtaagttacagcgacacggtatattagatggtgccaccgtagtgtatataggatcggctcctggtacacatatacgttatttgagagatcatttctataatttaggagtgatcatcaaatggatgctaattgacggccgccatcatgatcctattttaaatggattgcgtgatgtgactctagtgactcggttcgttgatgaggaatatctacgatccatcaaaaaacaactgcatccttctaagattattttaatttctgatgtaagatccaaacgaggaggaaatgaacctagtacggcggatttactaagtaattacgctctacaaaatgtcatgattagtattttaaaccccgtggcatctagtcttaaatggagatgcccgtttccagatcaatggatcaaggacttttatatcccacacggtaataaaatgttacaaccttttgctccttcatattcagctgaaatgagattattaagtatttataccggtgagaacatgagactgactcgagttaccaaattagacgctgtaaattatgaaaaaaagatgtactaccttaataagatcgtccgtaacaaagtagttgttaactttgattatcctaatcaggaatatgactattttcacatgtactttatgctgaggaccgtgtactgcaataaaacatttcctactactaaagcaaaggtactatttctacaacaatctatatttcgtttcttaaatattccaacaacatcaactgaaaaagttagtcatgaaccaatacaacgtaaaatatctagcaaaaattctatgtctaaaaacagaaatagcaagagatccgtacgcggtaataaatagaaacgtgctactgagatatactaccgatatagagtataatgatttagttactttaataaccgttagacataaaattgattctatgaaaactgtgtttcaggtatttaacgaatcatccataaattatactccggttgatgatgattatggagaaccaatcattataacatcgtatcttcaaaaaggtcataacaagtttcctgtaaattttctatacatagatgtggtaatatctgacttatttcctagctttgttagactagatactacagaaactaatatagttaatagtgtactacaaacaggcgatggtaaaaagactcttcgtcttcccaaaatgttagagacggaaatagttgtcaagattctctatcgccctaatataccattaaaaattgttagatttttccgcaataacatggtaactggagtagagatagccgatagatctgttatttcagtcgctgattaatcaattagtagagatgagataagaacattataataatcaataatattatcttatatctcgtttagaaaaatgctaatattaaaatagctaacgctagtaatccaatcggaagccatttgatatctataatagggtatctaatttcctgattcagatagcggacagctatattctcggtagctactcgtttggaatcacaaacattatttacatctaatttactatctgtaatggaaacgtttcccaatgaaatggtacaatccgatacattgcattttgttatatttttttttaaagaggctggtaacaacgcatcgcttcgtttacatggctcgtaccaacaataatagggtaatcttgtatctattcctatccgtactatgcttttatcaggataaatacatttacatcgtatatcgtctttgttagcatcacagaatgcataaatttgttcgtccgtcatgataaaaatttaaagtgtaaatataactattatttttatagttgtaataaaaagggaaatttgattgtatactttcggttctttaaaagaaactgacttgataaaaatggctgtaatctctaaggttacgtatagtctatatgatcaaaaagagattaatgctacagatattatcattagtcatgttaaaaatgacgacgatatcggtaccgttaaagatggtagactaggtgctatggatggggcattatgtaaaacttgtgggaaaacggaattggaatgtttcggtcactggggtaaagtaagtatttataaaactcatatagttaagcctgaatttatttcagaaattattcgtttactgaatcatatatgtattcactgcggattattgcgttcacgagaaccgtattccgacgatattaacctaaaagagttatcgggacacgctcttaggagattaaaggataaaatattatccaagaaaaagtcatgttggaacagcgaatgtatgcaaccgtatcaaaaaattactttttcaaagaaaaaggtttgtttcgtcaacaagttggatgatattaacgttcctaattctctcatctatcaaaagttaatttctattcatgaaaagttttggccattattagaaattcatcaatatccagctaacttattttatacagactactttcccatccctccgctgattattagaccggctattagtttttggatagatagtatacccaaagagaccaatgaattaacttacttattaggtatgatcgttaagaattgtaacttgaatgctgatgaacaggttatccagaaggcggtaatagaatacgatgatattaaaattatttctaataacactaccagtatcaatttatcatatattacatccggcaaaaataatatgattagaagttatatcgtcgcccgacgaaaagatcagaccgctagatctgtaattggtcccagtacatctatcaccgttaatgaggtaggaatgcccgcatatattagaaatacacttacagaaaagatatttgttaatgcctttacagtggataaagttaaacaactattagcgtcaaaccaagttaaattttactttaataaacgattaaaccaattaacaagaatacgccaaggaaagtttatcaaaaataaaatacatttattgcctggtgattgggtagaagtagctgttcaagaatatacaagtattatttttggaagacagccgtctctacatagatacaacgtcatcgcttcatctatcagagctaccgaaggagatactatcaaaatatctcccggaattgccaactctcaaaatgctgatttcgacggagatgaagaatggatgatattggagcaaaatcctaaagccgtaattgaacaaagtattcttatgtatccgacgacgttactcaaacacgatattcatggagcccccgtttatggatctattcaagatgaaatcgtagcagcgtattcattgtttaggatacaagatctttgtttagatgaagtattgaacatcttggggaaatatggaagagagttcgatcctaaaggtaaatgtaaattcagcggtaaagatatctatacttacttgataggtgaaaagattaattatccgggtctcttaaaggatggtgaaattattgcaaacgacgtagatagtaattttgttgtggctatgaggcatctgtcattggctggactcttatccgatcataagtcgaacgtggaaggtatcaactttattatcaagtcatcttatgtttttaagagatatctatctatttacggttttggggtgacattcaaagatctgagaccaaattcgacgttcactaataaattggaggccatcaacgtagaaaaaatagaacttatcaaagaagcatacgccaaatatctcaacgatgtaagagacgggaaaatagttccattatctaaagctttagaggcggactatgtggaatccatgttatccaacttgacaaatcttaatatccgagagatagaagaacatatgagacaaacgctgatagatgatccagataataacctcctgaaaatggccaaagcgggttataaagtaaatcctacagaactaatgtatattctaggtacgtatggacaacaaaggattgatggtgaaccagcagagactcgagtattgggtagagtcttaccttactatcttccagactctaaggatccagaaggaagaggttacattcttaattctttaacaaaaggattaacgggttctcaatattacttttcgatgctggttgccagatctcaatctactgatatcgtctgtgaaacatcacgtaccggaacactggctagaaaaatcattaaaaagatggaggatatggtggtcgacggatacggacaagtagttataggtaatacgctcatcaagtacgccgccaattataccaaaattctaggctcagtatgtaaacctgtagatcttatctatccagatgagtccatgacttggtatttggaaattagtgctctgtggaataaaataaaacagggattcgtttactctcagaaacagaaacttgcaaagaagacattggcgccgtttaatttcctagtattcgtcaaacccaccactgaggataatgctattaaggttaaggatctgtacgatatgattcataacgtcattgatgatgtgagagagaaatacttctttacggtatctaatatagattttatggagtatatattcttgacgcatcttaatccttctagaattagaattacaaaagaaacggctatcactatctttgaaaagttctatgaaaaactcaattatactctaggtggtggaactcctattggaattatttctgcacaggtattgtctgagaagtttacacaacaagccctgtccagttttcacactactgaaaaaagtggtgccgtcaaacaaaaacttggtttcaacgagtttaataacttgactaatttgagtaagaataagaccgaaattatcactctggtatccgatgatatctctaaacttcaatctgttaagattaatttcgaatttgtatgtttgggagaattaaatccagacatcactcttcgaaaagaaacagataaatatgtagtagatataatagttaatagattatacatcaagagagcagaaataaccgaattagttgtcgaatatatgattgaacgatttatctcctttagcgtcattgtaaaggaatggggtatggagacattcattgaggacgaggataatattagatttactgtctacctaaatttcgttgaaccggaagaattgaatcttagtaagtttatgatggttcttccgggtgccgccaacaagggcaagattagtaaattcaagattcctatctctgattatacgggttatgacgacttcaatcaaacaaaaaagctcaataagatgactgtagaactcatgaatctaaaagaattgggttctttcgatttggaaaacgtcaacgtgtatcctggagtatggaatacatacgatatcttcggtatcgaggccgctcgtgaatacttgtgcgaagccatgttaaacacctatggagaagggttcgattatctgtatcagccttgtgatcttctcgctagtttactatgtgctagttacgaaccagaatcagttaataaattcaagttcggtgcagctagtactcttaagagagctacgttcggagacaataaagcattgttaaacgcggctcttcataaaaagtcagaacctattaacgataatagtagctgccacttttttagcaaggtccctaatataggaactggatattacaaatactttatcgacttgggtcttctcatgagaatggaaaggaaactatctgataagatatcttctcaaaagatcaaggaaatggaagaaacagaagacttttaattcttatcaataacatatttttctatgatctgtcttttaaacgatggattttccacaaatgcgcctctcaagtccctcatagaatgatacacgtataaaaaatatagcataggcaatgactccttatttttagacattagatatgccaaaatcatagccccgcttctatttactcccgcagcacaatgaaccaacacgggctcgtttcgttgatcacatttagataaaaaggcggttacgtcgtcaaaatatttactaatatcggtagttgtatcatctaccaacggtatatgaataatattaatattagagttaggtaatgtatatttatccatcgtcaaatttaaaacatatttgaacttaacttcagatgatggtgcatccatagcatttttataatttcccaaatacacattattggttacccttgtcattatagtgggagatttggctttgtgcatatctccagttgaacgtagtagtaagtatttatacaaacttttcttatccatttataacgtacaaatggataaaactactttatcggtaaacgcgtgtaatttagaatacgttagagaaaaggctatagtaggcgtacaagcagccaaaacatcaacacttatattctttgttattatattggcaattagtgcgctattactctggtttcagacgtctgataatccagtctttaatgaattaacgagatatatgcgaattaaaaatacggttaacgattggaaatcattaacggatagcaaaacaaaattagaaagtgatagaggtagacttctagccgctggtaaggatgatatattcgacttcaaatgtgtggatttcggcgcctattttatagctatgcgattggataagaaaacatatctgccgcaagctattaggcgaggtactggagacgcgtggatggttaaaaaggcggcaaaggtcgatccatctgctcaacaattttgtcagtatttgataaaacacaagtctaataatgttattacttgtggtaatgagatgttaaatgaattaggttatagcggttattttatgtcaccgcattggtgttccgattttagtaatatggaatagtgttagataaatgcggtaacgaatgttcctgtaaggaaccataacagtttagatttaacgttaaagatgagcataaacataataaacaaaattacaatcaaacctataacattaatatcaaacaatccaaaaaatgaaatcagtggagtagtaaacgcgtacataactcctggataacgtttagcagctgccgttcctattctagaccaaaaattcggtttcatgttttcgaagcggtgttctgcaacaagtcggggatcgtgttctacatatttggcggcgttatccagtatctgcctattgatcttcatttcgttttcgattctggctatttcaaaataaaatcccgatgatagacctccagactttataatttcatctacgatgttcagcgccgtagtaactctaataatataggctgataagctaacatcataccctcctgtatatgtgaatatggcatgatttttgtccattacaagctcggttttaactttattgcctgtaataatttctctcatctgtaggatatctatttttttgtcatgcattgccttcaagacgggacgaagaaacgtaatatcctcaataacgttatcgttttctacaataactacatattctacctttttattttctaactcggtaaaaaaattagaatcccatagggctaaatgtctagcgatatttcttttcgtttcctctgtacacatagtgttacaaaaccctgaaaagaagtgagtatacttgtcatcatttctaatgtttcctccagtccactgtataaacgcataatccttgtaatgatctggatcatccttgactaccacaacatttcttttttctggcataacttcgttgtcctttacatcatcgaacttctgatcattaatatgctcatgaacattaggaaatgtttctgatggaggtctatcaataactggcacaacaataacaggagttttcaccgccgccatttagttattgaaattaatcatatacaactctttaatacgagttatattttcgtctatccattgtttcacatttacatatttcgacaaaaagatataaaatgcgtattccaatgcttctctgtttaatgaattactaaaatatacaaacacgtcactgtctggcaataaatgatatcttagaatattgtaacaatttattttgtattgcacatgttcgtgatctatgagttcttcttcgaatggcataggatctccgaatctgaaaacgtataaataggagttagaataataatatttgagagtattggtaatatataaactctttagcggtataattagtttttttctctcaatttctatttttagatgtgatggaaaaatgactaattttgtagcattagtatcatgaactctaatcaaaatcttaatatcttcgtcacacgttagctctttgaagtttttaagagatgcatcagttggttctacagatggagtaggtgcaacaattttttgttctacacatgtatgtactggagccattgttttaactataatggtgcttgtatcgaaaaactttaatgcagatagcggaagctcttcgccgcgactttctacatcgtaattgggttctaacgccgatctctgaatggatactagttttctaagttctaatgtgattctctgaaaatgtaaatccaattcctccggcattatagatgtgtatacatcggtaaataaaactatagtatccaacgatcccttctcgcaaattctagtcttaaccaaaaaatcgtatataaccacggagatggcgtatttaagagtggattcttctaccgttttgttcttggatgtcatataggaaactataaagtccgcactactgttaagaatgattactaacgcaactatatagttcaaattaagcattttggaaacataaaataactctgtagacgatacttgactttcgaataagtttgcagacaaacgaagaaagaacagacctctcttaatttcagaagaaaactttttttcgtattcctgacgtctagagtttatatcaataagaaagttaagaattagtcggttaatgttgtatttcattacccaagtttgagatttcataatattatcaaaagacatgataatattaaagataaagcgctgactatgaacgaaatagctatatggttcgctcaagaatatagtcttgttaaacgtggaaacgataactgtatttttaatcacgtcagcggcatctaaattaaatataggtatatttattccacacactctacaatatgccacaccatcttcataataaataaattcgttagcaaaattattaattttagtgaaatagttagcgtcaactttcatagcttccttcaatctaatttgatgctcacacggtgcgaattccactctaacatcccttttccatgcctcaggttcatcgatctctataatatctagtttcttgcgtttcacaaacacgggctcgtctctcgcgatgagatctgtatagtaactatgtaaatgataactagatagaaagatgtagctatatagatgacgatcctttaagagaggtataataactttaccccaatcagataaactattgttatggtcttcggaaaaagaatttttataaatttttccagtattttccaaatatacgtacttgacatctaaaaaatccttaatgataataggaatggataatccgtctattttataaagaaatacatatcgcacattatacttttttttggaaatgggaataccgatgtgtctacataaatatgcaaagtctaaatattttttagagaatcttagttggtccaaattcttttccaagtacggtaatagatttttcatattgaacggtatcttcttaatctctggttctagttccgcattaaatgatgaaactaagtcactatttttataactaacgattacatcacctctaacatcatcatttaccagaatactgatcttcttttgtcgtaaatacatgtctaatgtgttaaaaaaaagatcatacaagttatacgtcatttcatctgtggtattcttgtcattgaaggataaactcgtactaatctcttctttaacagcctgttcaaatttatatcctatatacgaaaaaatagcaaccagtgtttgatcatccgcgtcaatattctgttctatcgtagtgtataacaatcgtatatcttcttctgtgatagtcgatacgttataaaggttgataacgaaaatatttttatttcgtgaaataaagtcatcgtaggattttggacttatattcgcgtctagtagatatgcttttatttttggaatgatctcaattagaatagtctctttagagtccatttaaagttacaaacaactaggaaattggtttatgatgtataatttttttagtttttatagattctttattctatacttaaaaaatgaaaataaatacaaaggttcttgagggttgtgttaaattgaaagcgagaaataatcataaattatttcattatcgcgatatccgttaagtttgtatcgtaatggcgtggtcaattacaaataaagcggatactagtagcttcacaaagatggctgaaatcagagctcatctaaaaaatagcgctgaaaataaagataaaaacgaggatattttcccggaagatgtaataattccatctactaagcccaaaaccaaacgagccactactcctcgtaaaccagcggctactaaaagatcaaccaaaaaggaggaagtggaagaagaagtagttatagaggaatatcatcaaacaactgaaaaaaattctccatctcctggagtcagcgacattgtagaaagcgtggccgctgtagagctcgatgatagcgacggggatgatgaacctatggtacaagttgaagctggtaaagtaaatcatagtgctagaagcgatctttctgacctaaaggtggctaccgacaatatcgttaaagatcttaagaaaattattactagaatctctgcagtatcgacggttctagaggatgttcaagcagctggtatctctagacaatttacttctatgactaaagctattacaacactatctgatctagtcaccgagggaaaatctaaagttgttcgtaaaaaagttaaaacttgtaagaagtaaatgcgtgcacttttttataaagatggtaaactctttaccgataataattttttaaatcctgtatcagacgataatccagcgtatgaggttttgcaacatgttaaaattcctactcatttaacagatgtagtagtatatgaacaaacgtgggaggaggcgttaactagattaatttttgtgggaagcgattcaaaaggacgtagacaatacttttacggaaaaatgcatgtacagaatcgcaacgctaaaagagatcgtatttttgttagagtatataacgttatgaaacgaattaattgttttataaacaaaaatataaagaaatcgtccacagattccaattatcagttggcggtttttatgttaatggaaactatgttttttattagatttggtaaaatgaaatatcttaaggagaatgaaacagtagggttattaacactaaaaaataaacacatagaaataagtcccgatgaaatagttatcaagtttgtaggaaaggacaaagtttcacatgaatttgttgttcataagtctaatagactatataagccgctattgaaactgacggatgattctagtcccgaagaatttctgttcaacaaactaagtgaacgaaaggtatacgaatgtatcaaacagtttggtattagaatcaaggatctccgaacgtatggagtcaattatacgtttttatataatttttggacaaatgtaaagtccatatctcctcttccatcaccaaaaaagttaatagcgttaactatcaaacaaactgctgaagtggtaggtcatactccatcaatttcaaaaagagcttacatggcaacgactattttagaaatggtaaaggataaaaattttttagatgtagtatctaaaactacgttcgatgaattcctatctatagtcgtagatcacgttaaatcatctacggatggatgatatagatctttacacaaataattacaagaccgataaatggaaatggataagcgtatgaaatctctcgcaatgacagctttcttcggagagctaaacacattagatattatggcattgataatgtctatatttaaacgccatccaaacaataccattttttcagtggataaggatggtcagtttatgattgatttcgaatacgataattataaggcttctcaatatttggatctgaccctcactccgatatctggagatgaatgcaagactcacgcatcgagtatagccgaacaattggcgtgtgtggatattattaaagaggatattagcgaatatatcaaaactactccccgtcttaaacgatttataaaaaaataccgcaatagatcagatactcgtatcagtcgagatacagaaaagcttaaaatagctctagctaaaggcatagattacgaatatataaaagacgcttgttaataagtaaatgaaaaaaaactagtcgtttataataaaacacaatatggatgccaacatagtatcatcttctactattgcaacgtatatagacgctttagcaaagaatgcttcagaattagaacagaggtctaccgcatacgaaataaataatgaattggaactagtatttattaagccgccattaattactttgacaaatgtagtgaatatctctacgattcaggaatcgtttattcgatttaccgttactaataaggaaggtgtcaaaattagaactaagattccattatctaaggtacatggtctagatgtaaaaaatgtacagttagtagatgctatagataacatagtttgggaaaagaaatcattagtgacggaaaatcgtcttcacaaagaatgcttgttgagactatcgacagaggaacgtcatatatttttggattacaagaaatatggatcctctatccgactagaattagtcaatcttattcaagcaaaaacaaaaaactttacgatagactttaagctaaaatattttctaggatccggtgcccaatctaaaagttctttgttgcacgctattaatcatccaaagtcaaggcctaatacatctctggaaatagaattcacacctagagacaatgaaaaagttccatatgatgaactaataaaggaattgacgactctatcacgtcatatatttatggcttctccagagaatgtaattctttctccgcctattaacgcacctataaagacttttatgttgcctaaacaagatatagtaggtctggatctggaaaatctatatgccgtaactaagactgacggcattcctataactatcagagttacatcaaacgggttgtattgttattttacacatcttgggtatattattagatatccagttaagagaataatagattccgaagtagtagtctttggtgaggcagttaaggataagaactggaccgtatatctcattaagctaatagagcctgtgaatgcaatcaatgatagactagaagaaagtaagtatgttgaatctaaactagtggatatttgtgatcggatagtattcaagtcaaagaaatatgaaggtccgtttactacaactagtgaagtcgtcgatatgttatctacatatttaccaaagcaaccagaaggtgttattctgttctattcaaagggacctaaatctaacattgattttaaaattaaaaaggaaaatactatagaccaaactgcaaatgtagtatttaggtacatgtccagtgaaccaattatctttggagaatcgtctatctttgtagagtataagaaatttagcaacgataaaggctttcctaaagaatatggttctggtaagattgtgttatataacggcgttaattatctaaataatatctattgtttggaatatattaatacacataatgaagtgggtattaagtccgtggttgtacctattaagtttatagcagaattcttagttaatggagaaatacttaaacctagaatcgataaaaccatgaaatatattaactcagaagattattatggaaatcaacataatatcatagtcgaacatttaagagatcaaagcatcaaaataggagatatctttaacgaggataaactatcggatgtgggacatcaatacgccaataatgataaatttagattaaatccagaagttagttattttacgaataaacgaactagaggaccgttgggaattttatcaaactacgtcaagactcttcttatttctatgtattgttccaaaacatttttagacgattccaacaaacgaaaggtattggcgattgattttggaaacggtgctgacctggaaaaatacttttatggagagattgcgttattggtagcgacggatccggatgctgatgctatagctagaggaaatgaaagatacaacaaattaaactctggaattaaaaccaagtactacaaatttgactacattcaggaaactattcgatccgatacatttgtctctagtgtcagagaagtattctattttggaaagtttaatatcatcgactggcagtttgctatccattattcttttcatccgagacattatgctaccgtcatgaataacttatccgaactaactgcttctggaggcaaggtattaatcactaccatggacggagacaaattatcaaaattaacagataaaaagacttttataattcataagaatttacctagtagcgaaaactatatgtctgtagaaaaaatagctgatgatagaatagtggtatataatccatcaacaatgtctactccaatgactgaatacattatcaaaaagaacgatatagtcagagtgtttaacgaatacggatttgttcttgtagataacgttgatttcgctacaattatagaacgaagtaaaaagtttattaatggcgcatctacaatggaagatagaccgtctacaaaaaactttttcgaactaaatagaggagccattaaatgtgaaggtttagatgtcgaagacttacttagttactatgttgtttatgtcttttctaagcggtaaataataatatggtatgggttctgatatccccgttctaaatgcattaaataattccaatagagcgatttttgttcctataggaccttccaactgtggatactctgtattgttaatagatatattaatacttttgtcgggtaacagaggttctacgtcttctaaaaataaaagtttgataacatctggcctgttcataaataaaaacttggcgattctatatatactcttattatcaaatctagccattgtcttatagatgtgagctactgtaggtgtaccatttgattttctttctaatactatatatttctctcgaagaagttcttgcacatcatctgggaataaaatactactgttgagtaaatcagttattttttttatatcgatattgatggacatttttatagttaaggataataagtatcccaaagtcgataacgacgataacgaagtatttatacttttaggaaatcacaatgactttatcagatcaaaattaacaaaattaaaggagcatgtatttttttctgaatatattgtgactccagatacatatggatctttatgcgtcgaattaaatgggtctagttttcagcacggtggtagatatatagaggtggaggaatttatagatgctggaagacaagttagatggtgttctacatccaatcatatatctgaagatatacccgaagatatacacactgataaatttgtcatttatgatatatacacttttgacgctttcaagaataaacgattggtattcgtacaggtacctccgtcgttaggagatgatagctatttgactaatccgttattgtctccgtattatcgtaattcagtagccagacaaatggtcaatgatatgatttttaatcaagattcatttttaaaatatttattagaacatctgattagaagccactatagagtttctaaacatataacaatagttagatacaaggataccgaagaattaaatctaacgagaatatgttataatagagataagtttaaggcgtttgtattcgcttggtttaacggcgtttcggaaaatgaaaaggtactagatacgtataaaaaggtatctaatttgatataatgaattcagtgactgtatcacacgcgccatatactattacttatcacgatgattgggaaccagtaatgagtcaattggtagagttttataacgaagtagccagttggctgctacgagacgagacgtcgcctattcctgataagttctttatacagttgaaacaaccgcttagaaataaacgagtatgtgtgtgcggtatagatccgtatccgaaagatggaactggtgtaccgttcgaatcaccaaattttacaaaaaaatcaattaaggagatagcttcatctatatctagattaaccggagtaattgattataaaggttataaccttaatataatagacggggttataccctggaattattacttaagttgtaaattaggagaaacaaaaagtcacgcgatctactgggataagatttccaagttactgctgcagcatataactaaacacgttagtgttctttattgtttgggtaaaacagatttctcgaatatacgggcaaagttagaatccccggtaactaccatagtgggatatcatccagcggctagagaccgtcaattcgagaaagatcgatcatttgaaattatcaacgttttactggaattagacaacaaggtacctataaattgggctcaagggtttatttattaatgctttagtgaaattttaacttgtgttctaaatggatgcggctattagaggtaatgatgttatctttgttcttaagactataggtgtcccgtcagcgtgcagacaaaatgaagatccaagatttgtagaagcatttaaatgcgacgagttagaaagatatattgagaataatccagaatgtacactattcgaaagtcttagggatgaggaagcatactctatagtcagaattttcatggatgtagatttagacgcgtgtctagacgaaatagattatttaacggctattcaagattttattatcgaggtgtcaaactgtgtagctagattcgcgtttacagaatgcggcgccattcatgaaaatgtaataaaatccatgagatctaatttttcattgactaagtctacaaatagagataaaacaagttttcatattatctttttagacacgtataccactatggatacattgatagctatgaaacgaacactattagaattaagtagatcatctgaaaatccactaacaagatcgatagacactgccgtatataggagaaaaacaactcttcgggttgtaggtactaggaaaaatccaaattgcgacactattcatgtaatgcaaccacctcatgataatatagaagattacctattcacttacgtggatatgaacaacaatagttattacttttctctacaacgacgattggaggatttagttcctgataagttatgggaaccagggtttatttcattcgaagacgctataaaaagagtttcaaaaatattcattaattctataataaactttaatgatctcgatgaaaataattttacaacggtaccactggtcatagattacgtaacaccttgtgcattatgtaaaaaacgatcgcataaacatccgcatcaactatcgttggaaaatggtgctattagaatttacaaaactggtaatccacatagttgtaaagttaaaattgttccgttggatggtaataaactgtttaatattgcacaaagaattttagacactaactctgttttattaaccgaacgaggagaccatatagtttggattaataattcatggaaatttaacagcgaagaacccttgataacaaaactaattttgtcaataagacatcaactacctaaggaatattcaagcgaattactctgtccaagaaaacgaaagactgtagaagctaacatacgagacatgttagtagattcagtggagaccgatacctatccggataaacttccgtttaaaaatggtgtattggacctggtagacggaatgttttactctggagatgatgctaaaaaatatatgtgtactgtatcaaccggatttaaatttgacgatacaaagttcgtcgaagacagtccagaaatggaagagttaatgaatatcattaacgatatccaaccattaacggatgaaaataagaaaaatagagagctatatgaaaaaacattatctagttgtttatgcggtgctaccaaaggatgtttaacattcttttttggagaaactgcaactggaaagtcgacaaccaaacgtttgttaaagtctgctatcggtgacctgtttgttgagacgggtcaaacaattttaacagatgtattggataaaggacctaatccatttatcgctaacatgcatttgaaaagatctgtattctgtagcgaactacctgattttgcatgtagtgggtcaaagaaaatcagatctgataatattaaaaagttgacagaaccttgtgtcattggaagaccgtgtttctccaataaaattaataatagaaaccatgcgacaatcattatcgatactaattacaaacctgtttttgataggatagataacgcattaatgagaagaattgccgtcgtgcgattcagaacacacttttctcaaccttctggtagagaggctgctgaaaataatgacgcgtacgataaagtcaaactattagacgaggggttagatggtaaaatacaaaataatagatatagattcgcatttctatacttgttggtgaaatggtacagaaaatatcatgttcctattatgaaactatatcctacacccgaagagattcctgactttgcattctatctcaaaataggtactctgttggtatctagctctgtaaagcatattccattaatgacggacctctccaaaaagggatatatattgtacgataatgtggtcactcttccgttgactactttccaacagaaaatatccaagtattttaattctagactatttggacacgatatagagagcttcatcaatagacataagaaatttgccaatgttagtgatgaatatctgcaatatatattcatagaggatatttcatctccgtaaatatatgctcatatatttatagaagatatcacatatctaaatgaataccggaattatagatttatttgataatcatgttgatagtataccaactatattacctcatcagttagctactctagattatctagttagaactatcatagatgagaacagaagcgtgttattgttccatattatgggatcaggtaaaacaataatcgctttgttgttcgccttggtagcttccagatttaaaaaggtttacattctagtgccgaacatcaacatcttaaaaattttcaattataatatgggtgtagctatgaacttgtttaatgacgaattcatagctgagaatatctttattcattccacaacaagtttttattctcttaattataacgataacgtcattaattataacggattatctcgctacaataactctatttttatcgttgatgaggcacataatatctttgggaataatactggagaacttatgaccgtgataaaaaataaaaacaagattccttttctactattgtctggatctcccattactaacacacctaatactctgggtcatattatagatttaatgtccgaagagacgatagattttggtgaaattattagtcgtggtaagaaagtaattcagacacttcttaacgaacgcggtgtgaatgtacttaaggatttgcttaaaggaagaatatcatattacgaaatgcctgataaagatctaccaacgataagatatcacggacgtaagtttctagatactagagtagtatattgtcacatgtctaaacttcaagagagagattatatgattactagacgacagctatgttatcatgaaatgtttgataaaaatatgtataacgtgtcaatggcagtattgggacaacttaatctgatgaataatttagatactttatttcaggaacaggataaggaattgtacccaaatctgaaaataaataatggcgtgttatacggagaagaattggtaacgttaaacattagttccaaatttaaatactttattaatcggatacagacactcaacggaaaacattttatatacttttctaattctacatatggcggattggtaattaaatatatcatgctcagtaatggatattctgaatataatggttctcagggaactaatccacatatgataaacggcaaaccaaaaacatttgctatcgttactagtaaaatgaaatcgtctttagaggatctattagatgtgtataattctcctgaaaacgatgatggtagtcaattgatgtttttgttttcatcaaacattatgtccgaatcctatactctaaaagaggtaaggcatatttggtttatgactatcccagatactttttctcaatacaaccaaattcttggacgatctattagaaaattctcttacgccgatatttctgaaccagttaatgtatatcttttagccgccgtatattccgatttcaatgacgaagtgacgtcattaaacgattacacacaggatgaattaattaatgttttaccatttgacatcaaaaagctgttatatctaaaatttaagacgaaagaaacgaatagaatatactctattcttcaagagatgtctgaaacgtattctcttccaccacatccatcaattgtaaaagttttattgggagaattggtcagacaatttttttataataattctcgtattaagtataacgataccaagttacttaaaatggttacatcagttataaaaaataaagaagacgctaggaattacatagatgatattgtaaacggtcacttctttgtatcgaataaagtatttgataaatctcttttatacaaatacgaaaacgatattattacagtaccgtttagactttcctacgaaccatttgtttggggagttaactttcgtaaagaatataacgtggtatcttctccataaaactgatgagatatataaagaaataaatgtcgagctttgttaccaatggataccttccagttacattggagccacacgagctgacgttagacataaaaactaatattaggaatgccgtatataagacgtatctccatagagaaattagtggtaaaatggccaagaaaatagaaattcgtgaagacgtggaattacctctcggcgaaatagttaataattctgtagttataaacgttccgtgtgtaataacctacgcgtattatcacgttggggatatagttagaggaacattaaacatcgaagatgaatcaaatgtaactattcaatgtggagatttaatctgtaaactaagtagagattcgggtactgtatcatttagcgattcaaagtactgcttttttcgaaatggtaatgcgtatgacaatggcagcgaagtcactgccgttctaatggaggctcaacaaggtatcgaatctagttttgtttttctcgcgaatatcgtcgactcataagaaagagaatagcggtaagtataaacacgaatactatggcaataattgcgaatgttttattcccttcgatatatttttgataatatgaaaaacatgtctctctcaaatcggacaaccatctcataaaatagttatctcgcgctggcgaggtggttgccgctcgtataatctccccagaataatatacttgcgtgtcgtcgttcaatttatacggatttctatagttctctgttatataatgcggttttccatcatgattagacgacgacaatagtgttctaaatttagatagttgatcagaatgaatgtttattggcgttggaaaaattatccatgctgcgtctgcagagtggttgatagttgttcctagatatgtaaaataatccaacgtactaggtagcaaattgtctagataaaatactgaatcaaacggcgcagacgtattagcggatctaatggaatccaattgattgactatcttttgaaaatatacatttttatgatccgatacttgtaagaatatagaaataatgataagtccatcatcgtgtttttttgcctcttcataagaactatattttttcttattccaatgaacaagattaatctctccagagtatttgtacacatctatcaagtgattggatccataatcgtcttcctttccccaatatatatgtagtgatgataacacatattcattggggagaaaccctccacttatatatcctcctttaaaattaatccttactagttttccagtgttctggatagtggttggtttcgactcattataatgtatgtctaacggcttcaatcgcgcgttagaaattgcttttttagtttctatattaataggagatagttgttgcggcatagtaaaaatgaaatgataactgtttaaaaatagctcttagtatgggaattacaatggatgaggaagtgatatttgaaactcctagagaattaatatctattaaacgaataaaagatattccaagatcaaaagacacgcatgtgtttgctgcgtgtataacaagtgacggatatccgttaataggagctagaagaacttcattcgcgttccaggcgatattatctcaacaaaattcagattctatctttagagtatccactaaactattacggtttatgtactacaatgaactaagagaaatctttagacggttgagaaaaggttctatcaacaatatcgatcctcactttgaagagttaatattattgggtggtaaactagataaaaaggaatctattaaagattgtttaagaagagaattaaaagaggaaagtgatgaacgtataacagtaaaagaatttggaaatgtaattctaaaacttacaacacgggataaattatttaataaagtatatataggttattgcatggcgtgttttattaatcaatcgttggaggatttatcgcatactagtatttacaatgtagaaattagaaagattaaatcattaaatgattgtattaacgacgataaatacgaatatctgtcttatatttataatatgctagttaatagtaaatgaacttttacagatctagtataattagtcagattattaagtataatagacgactagctaagtctattatttgcaaggatgactctcaaattattacactcacggcattcgttaaccaatgcctatggtgtcataaacgagtatccgtgtccgctattttattaactactgataacaaaatattagtatgtaacagacgagatagttttctctattctgaaataattagaactagaaacatgtttagaaagaaacgattatttctgaattattccaattatttgtccaaacaggaaagaagtatactatcgtcatttttttctctatatccagctactgctgataatgatagaatagacgctatttatccgggtggcatacccaaaaggggtgagaatgttccagagtgtctatccagggaaatcaaagaagaagttaatatagacaattcttttgtattcatagacactcggttttttattcatggtatcatagaagataccattatcaacaaattttttgaggtaattttctttgtcggaagaatatctctaacgagtgatcaaattattgatacctttaaaagtaatcatgaaatcaaggatctaatatttttagatccgaattcaggtaatggactccaatacgaaattgcaaaatatgctctagatactgcaaaacttaaatgttacggccatagaggatgttattatgaatcattaaaaaaattaactgaggatgattgattagaaaatataaattaatttaccatcgtgtatttttataacgggattgtccggcatatcatgtagatagttaccgtctacatcgtatactcgaccatctacgcctttaaatcctctatttattgacattaatctattagaattggaataccaaatattagtaccctcaattagtttattggtaatattttttttagacgatagatcgatggctcttgaaaccaaggttttccaaccggactcattgtcgatcggtgagaagtctttttcattagcatgaatccattctaatgatgtatgtttaaacactctaaacaattggacaaattcttttgatttgctttgaatgatttcaaataggtcttcgtctacagtaggcataccattagataatctagccattataaagtgcacgtttacatatctacgttctggaggagtaagaacgtgactattgagacgaatggctcttcctactatctgacgaagagacgcctcgttccatgtcatatctaaaatgaagatatcattaattgagaaaaaactaataccctcgcctccactagaagagaatacgcatgttttaatgcattctccgttagtgtttgattcttggttaaactcagccaccgccttgattctagtatcttttgttctagatgagaactctatattagagataccaaagactttgaaatatagtaataagatttctattcctgactgattaacaaatggttcaaagactagacatttaccatgggatgctaatattcccaaacatacatctataaatttgacgcttttctcttttaattcagtaaatagagagatatcagccgcactagcatcccctttcaatagttctccctttttaaaggtatttaatgcggatttagaaaactctctatctcttaatgaatttttaaaatcattatatagtgttgctatctcttgcgcgtattcgccgggatcacgattttgtctttcaggaaagctatcgaacgtaaacgtagtagccatacgtctcagaattctaaatgatgatataccagtttttatttctgcgagtttagccttttgataaatctcttcttgcttttttgacatattaacgtatcgcattaatactgttttcttagcgaatgatgcagacccttctacgttatcaaaaatagaaaactcgttattaactatgtacgaacataggcctcctagtttggagactaattctttttcatcgactagacgtttattctcaaatagtgattggtgttgtaaggatcctggtcgtagtaagttaaccaacatggtgaattcttgcacactattgacgataggtgtagccgataaacaaatcatcttatggttttttaatgcgatggtcttggataaaaaattatatactgaacgagtaggacggatcttaccatcttctttgattaatgatttagaaatgaagttatgacattcatcaataatgacgcatattctactcttggaattaatagttttgatattagtaaaaaatttatttctaaaattttgatcatcgtaattaataaaaatacaatccttcgttatctctggagcgtatctgagtatagtgttcatccaaggatcttctatcaaagcctttttcaccaataagataatagcccaattcgtataaatatccttaagatgtttgagaatatatacagtagtcattgttttaccgacacccgtttcatggaacaataaaagagaatgcatactgtctaatcctaagaaaactcttgctacaaaatgttgataatccttgaggcgtactacgtccgaccccatcatttcaacgggcatattagtagttctgcgtaaggcataatcgatataggccgcgtgtgatttactcatttatgagtgataagtaataactatgttttaaaaatcacagcagtagtttaactagtcttctctgatgtttgttttcgatactttttgaatcagaagtcatactagaataaagcaacgagtgaacgtaatagagagcttcgtatactctattcgaaaactctaagaacttattaatgaattccgtatccactggattgtttaaaatactaaattgaacactgttcacatccttccaagaagaagacttagtgacggacttaacatgagacataaataaatccaaattttttttacaaacatcactagccaccataatggcgctatctttcaaccagctatcgcttacgcattttagcagtctaacatttttaaagagactacaatatattctcatagtatcgattacacctctaccgaataaagttggaagtttaataatacaatatttttcgtttacaaaatcaaataatggtcgaaacacgtcgaaggttaacatcttataatcgctaatgtatagattgttttcagtgagatgattattagatttaatagcatctcgttcacgtttgaacagtttattgcgtgcgctgaggtcggcaactacggcgtccgctttagtactcctcccataatactttacgctattaatctttaaaatttcatagactttatctagatcgctttctggtaacatgatatcatgtgtaaaaagttttaacatgtcggtcggcattctatttagatcattaactctagaaatctgaagaaagtaattagctccgtattccagactaggtaatgggcttttacctagagacagattaagttctggcaatgtttcataaaatggaagaaggacatgcgttccctcccggatattttttacaatttcatccatttacaactctatagtttgttttcattattattagttattatctcccataatcttggtaatacttaccccttgatcgtaagataccttatacaggtcattacatacaactaccaattgtttttgtacataatagattggatggttgacatccatggtggaataaactactcgaacagatagtttatctttccccctagatacattggccgtaatagttgtcggcctaaagaatatctttggtgtaaagttaaaagttagggttcttgttccattattgctttttgtcagtagttcattataaattctcgagatgggtccgttctctgaatatagaacatcatttccaaatctaacttctagtctagaaataatatcggtcttattcttaaaatctattcccttgatgaagggatcgttaatgaacaaatccttggcctttgattcggctgatctattatctccgttatagacgttacgttgactagtccaaagacttacaggaatagatgtatcgatgatgttgatactatgtgatatgtgagcaaagattgttctcttagtggcatcactatatgttccagtaatggcggaaaactttttagaaatgttatatataaaagaattttttcgtgttccaaacattagcagattagtatgaagataaacactcatattatcaggaacattatcaatttttacatacacatcagcatcttgaatagaaacgataccatcttctggaacctcaacaatctcggcagactccggataaccagtcggtggaccatcgctaacaataactagatcatccaacaatctactcacatatgcatctatataatctttttcatcttgtgagtaccctggatacgaaataaatttattatccgtatttccataataaggtttagtataaacagagagcgatgttgccgcatgaacttcagttacagtcgccgttggttggtttatttgacctattactctcctaggtttctctataaacgatggtttaatttgtacattcttaaccatatatccaataaagctcaattcaggaacataaacaaattctttgttgaacgtttcaaagtcgaacgaagagtcacgaataacgatatcggatactggattgaaggttaccgttacggtaatttttgaatcggatagtttaagactgctgaatgtatcttccacatcaaacggagttttaatataaacgtatactgtagatggttctttaatagtgtcattaggagttaggccaatagaaatatcattaagttcactagaatatccagagtgtttcaaagcaattgtattattgatacaattattatataattcttcgccctcaatttcccaaataacaccgttacacgaagagatagatacgtgattaatacatttatatccaacatatggtacgtaaccgaatcttcccatacctttaacttctggaagttccaaactcagaaccaaatgattaagcgcagtaatatactgatccctaatttcgaagctagcgatagcctgattgtctggaccatcgtttgtcataactccggatagagaaatatattgcggcatatataaagttggaatttgactatcgactgcgaagacattagaccgtttaatagagtcatccccaccgatcaaagaattaatgatagtattattcattttctatttaaaatggaaaaagcttacaataaactccgtagagaaatatctataatttgtgagttttccttaaagtaacagcttccgtaaacgccgtctttatctcttagtaagtttattgtatttataaccttttccttatcttcatagaatactaaaggcaacaaagaaatttttggttcttctctaagagctacgtgagacttaaccatagaagccaacgaatccctacatattttagaacagaaataccctacttcaccacccttgtatgtctcaatactaataggtctaaaaaccaaatcttgattacaaaaccaacacttatcaattacactatttgtcttaatagacacatctgccatagatttataatactttggtagtatacaagcgagtgcttcttctttagcgggcttaaagactgctttaggtgctgaaataaccacatctggaaggcttactcgcttagccatttaattacggaactatttttttatacttctaatgagcaagtagaaaacctctcatctacaaaaacatactcgtgtccataatcctctaccatagttacacgttttttagatctcatatgtgctaaaaagttttcccatactaattggttactattatttttcgtataatttttaacagtttgaggttttagatttttagttacagaagtgatatcgaatattttatccaaaaagaatgaataattaattgtcttagaaggagtgttttcttggcaaaagaataccaagtgcttaaatatttctactacttcattaatcttttctgtactcagattcagtttctcatcttttacttgattgattatttcaaagactaacttataatcctttttatttattctctcgttagccttaagaaaactagatacaaaatttgcatctacatcatccgtggatatttgatttttttccatgatatccaagagttccgagataatttctccagaacattgatgagacaataatctccgcaatacatttctcaaatgaataagtttattagacacgtggaagtttgactttttttgtacctttgtacatttttgaaataccgactcgcaaaaaatacaatattcatatccttgttcagatactataccgttgtgtctacaaccgctacataatcgtagattcatgttaacactctacgtatctcgtcgtccaatattttatataaaaacattttatttctagacgttgccagaaaatcctgtaatacttttagttttttgggctgtgaataaagtatcgccctaatatggttaccgtcctccgccaatatagtagttaaattatccgcacatgcaaaagaacaccgcttaggcggattcagtacaatgttatatttttcgtaccaactcatttaaatatcataatctaaaatagttctgtaatatgtctagcgctaatatattgatcataatcctgtgcataaattaagatacaacaatgtctcgaaatcatcgacatggcttcttccatagttagaagatcgtcgtcaaagttagcaacgtgattcatcaacatttgctgttttgaggcagcaaatactgaaccgtcgccattcaaccattcataaaaaccatcgtctgaatccattgataatttcttgtactggtttttgagagctcgcatcaatctagcatttctagctcccggattgaaaacagaaagaggatcgtacatccagggtccattttctgtaaatagaatcgtataatgtcccttcaagaagatatcagacgatccacaatcaaagaattggtctccgagtttgtaacaaactgcggactttaacctatacatgataccgtttagcataatttctggtgatacgtcaatcggagtatcatctattagagatctaaagccggtgtaacattctccaccaaacatattcttattctgacgtcgttctacataaaacatcattgctccattaacgataacaggggaatgaacagcactacccatcacattagttcccaatggatcaatgtgtgtaactccagaacatcttccatagcctatgttaggaggagcgaacaccactcttccactattgccatcgaatgccatagaataaatatccttggaattgatagaaatcggactgtcggatgttgtgatcatcttcataggattaacaacgatgtatggtgccgcctgaagtttcatatcgtaactgatgccgttcataggtctagccacagaaaccaacgtaggtctaaatccaactatagacaaaatagaagccaatatctgttcctcatctgtcataacttgagagcatccagtatgaataatcttcattagatggggatctaccgcatcatcatcgttacaataaaaaattcccattctaatgttcataattgcttttctaatcatggtatgcatgtttgctctctgaatctctgtggaaattagatctgatacacctgtaatcactatcggattatcctccgtaagacgattaaccaacaacatataattataagactttacttttctaaattcataaagttgctggattaggctataggtgtctccatgtacatacgcgttctcgagcgcaggaagtttaataccgaatagtgccatcagaataggatgaatatagtaattagtttctggttttctataaataaaagacaaatcttgtgaactagacatatcggtaaaatgcatggattggaatcgtgtagtcgacagaagaatatgatgattagatggagagtatattttatctaactctttgagttggtcaccgattctaggactagctcgagaatgaataagtactaaaggatgagtacatttcacagaaacactagcattgttcaatgtgctctttacatgggtaaggagttgaaatagctcgtttctatttgttctgacaatatttagtttattcataatgttaagcatatcctgaatagtaaagttagatgtgtcatacttgttagtagttagatatttagcaattgcattcccatcatttctcaatctcgtactccaatcatgcgtggatgctacttcgtcgatggaaaccatacaatcctttttgataggctgttgagattgattatttcctgcacgtttaggtttggtacgttgatttctagcccctgcggatataaagtcatcgtctacaatttgggacaatgaattgcatacactacaagacaaagatttatcagaagtgtgaatatgatcttcatctaccaaagaaagagtttgattagtataactagattttagtcctgcgttagatgttaaaaaaacatcgctattgaccacggcttccattatttatattcgtagtttttactcgaaagcgtgattttaatatccaatcttattacttttggaatcgttcaaaacctttgactagttgtagaatttgatctattgccctacgcgtatactcccttgcatcatatacgttcgtcaccagatcgtttgtttcggcctgaagttggtgcatatctttttcaacactcgacatgagatccttaagggccatatcgtctagattttgttgagatgctgctcctggatttggattttgttgtgctgttgtacatactgtaccaccagtaggtgtaggagtacatacagtggccacaataggaggttgaggaggtgtaaccgttggagtagtacaagaaatatttccatccgattgttgtgtacatgtagttgttggtaacgtctgagaaggttgggtagatggcggtgtcgtcgtcttttgatctttattaaatttagagataatatcctgaacagcattgctcggcgtcaacgctggaaggagtgaactcgccggcgcatcagtatctgcagacagccaatcaaaaagattagacatatcagatgatgtattagtttgttgtcgtggttttggtgtaggagcagtactactaggtagaagaataggagccgatgtaggtgtcggaaccggctgtggagttatatgaatagttggttgtagcggttggataggctgtctgctggcggccatcatattatctctagctagttgttctcgcaactgtctttgataatacgactcttgagactttagtcctatttcaatcgcttcatcctttttcgtatccggatccttttcttcagaataatagattgacgactttggtgtagaggattctgccagcccctgtgagaacttgttaaagaagtccatttaaggctttaaaattgaattgcgattataagattaaatggcagacacagacgatattatcgactatgaatccgatgatctcactgaatacgaggatgatgaagaagaggaagaagatggagagtcactagaaactagtgatatagatcccaaatcttcttataagattgtagaatcagcatccactcatatagaagatgcgcattccaatcttaaacatatagggaatcatatatctgctcttaaacgacgctatactagacgtataagtctatttgaaatagcgggtataatagcagaaagctataacttgcttcaacgaggaagattacctctagtttcagaattttctgacgaaacgatgaagcaaaatatgctacatgtaattatacaagagatagaggagggttcttgtcctatagtcatcgaaaagaacggagaattgttgtcggtaaacgattttgacaaagatggtctaaaattccatctagactatattatcaaaatttggaaacttcaaaaacgatattagaatttatacgaatatcgttctctaaatgtcacaatcaagtctcgcatgttcagcaatttattgtcgtactttatatcgtgttcattaacgatatcttgcaaaatagtaatgattctatcttccttcgatagatattcttcagagattattgtcttatattctttcttgttatcagatatgaatttgataagactttgaacattattgatacccgtctgtttaattttttctacagatattttagttttggcagattctatcgtatctgtcaatagacatccaacatcgacattcgacgtcaattgtctataaatcaacgtataaattttagaaataacattagcgaattgttgtgcattgatgtcgttattctgaaacagtatgattttaggtagcattttcttaacaaagagaacgtatttattgttactcagttgaacagatgatatatccagattactaacgcatctgattccgtataccaaactttcagaagaaatggtatacaattgtttgtattcattcaatgtctctttttcagaaattagtttagagtcgaatactgcaataattttcaagagatagttttcatcagataagattttatttagtgtagatatgataaaactattgttttgttggagaacttgatacgccgcgttctctgtagtcgacgctctcaaatgggaaacgatctccattatttttttggaatcggatactatatcttcggtatcttgacgcagtctagtatacatagagttaagagagattagagtttgtacattaagcaacatgtctctaaatgtggctacaaacttttccttttccacatcatctagtttattatataccgatttcacaacggcaccagatttaaggaaccagaatgaaaaactctgataactacaatatttcatcatagttacgattttatcatcttctatagttggtgtaatagcgcatacctttttctccaagactggaaccaacgtcataaaaatgtttaaatcaaaatccatatcaacatctgatgcgctaagaccagtctcgcgttcaagattatctttactaatggtgacgaactcatcgtatagaactctaagtttgtccattatttatttacagatttagttgtttaatttatttgtgctcttccagagttgggatagtatttttctaacgtcggtattatattattaggatctacgttcatatgtatcataatattaatcatccacgttttgataaatctatctttagcttctgaaataacgtatttaaacaaaggagaaaaatatttagctacggcatcagacgcaataacattttttgtaaatgtaacgtatttagacgacagatcttcgttaaaaagttttccatctatgtagaatccatcagttgttaacaccattcccgcgtcagattgaataggagtttgaatagtttgttttggaaatagatccttcaataacttatagttgggtgggaaaaaatcgattttatcactagactctttcttttttactatcattacctcatgaactatttcttgaatgagtatatgtattttctttcctatatcggacgcgttcattggaaaatataccatgtcgttaactataagaatatttttatcctcgtttacaaactgaataatatcagatgtagttcgtaaacgaactatatcatcaccagcacaacatctaactatatgatatccactagtttcctttagtcgtttattatcttgttccatattagcagtcattccatcatttaagaaggcgtcaaagataatagggagaaatgacattttggattctgttacaactttaccaaaattaaggatatacggacttactatctttttctcaacgtcaatttgatgaacacacgatgaaaatgtacttcgatgagattgatcatgtagaaaacaacaagggatacaatatttccgcatatcatgaaatatattaagaaatcccaccttattatatttccccaaaggatccatgcacgtaaacattatgccgttatcattaataaagacttctttctcatcggatctgtaaaagttgttactgatttttttcattccaggatctagataattaataatgatgggttttctattcttattctttgtattttggcatatcctagaccagtaaacagtttccactttggtaaaatcagcagacttttgaacgctattaaacatggcattaatggcaataactaaaaatgtaaaatatttttctatgttaggaatatggtttttcactttaatagatatatggtttttggccaaaatgatagatatttttttatccgaggatagtaaaatattattagtcgccgtctctataaaaatgaagctagtctcgatatccaattttattctagaattgataggagtcgccaaatgtaccttatacgttatatctcccttgatgcgttccatttgtgtatctatatcggacacaagatctgtaaatagttttacgttattaatcatcacggtatcgccgtcgctagataatgctaatgtaccatccaagtcccaaatggagagatttaactgttcatcgtttagaataaaatgattaccggtcatattaataaagtgttcatcgtatctagataacaacgacttataattaatgtccaagtcttgaactcgctgaatgatcttttttaacccagttagttttagattggtacgaaatatattgttaaactttgattctacagtaatgtccaaatctagttgtggaaatacttccatcaacattgtttcaaacttgataatattattatctacatcttcatacgatccaaattccggaatagatgtatcacatgctcttgccacccagataaccaaaaagtcacacgctccaggatatacattgtataaaaagctatcgtttttaagtagggtttttttctgcgtgtatacgaagggattaaaaatagtattatcaacgtaactatattccaaattattcttatgagaatagataataatatcgtccttaatatctaacaaatttcctaaatatccctttaattgagtcattcgaagcgtcaatagaatatgtctcttaactatttccggctgttgtatatttaaatgacttcgtaaaaaataatatatgggcgacttctcatctatgtaatcatatggagtgagatatagggctcgttctacctcctgccccttacccacctgtaataccaattgcggacttactatatatcgcatatttatatcgtggggtaaagtgaaaatctactaccgatgatgtaagtcttacaatgttcgaaccagtaccagatcttaatttggaggcctccgtagaactaggggaggtaaatatagatcaaacaacacctatgataaaggaaaatagcggttttatatcccgtagtagacgtctattcgcccatagatctaaggatgatgagagaaaactagcactacgattctttttacaaagactttattttttagatcatagagagattcattatttgttcagatgcgttgacgctgtaaaagacgtcactattaccaaaaaaaataacattatcgtggcgccttatatagcacttttaactatcgcatcaaaaggatgcaaacttacagaaacaatgattgaagcattctttccagaactatataatgaacatagtaagaaatttaaattcaactctcaagtatccatcatccaagaaaaactcggataccagtttggaaactatcacgtttatgattttgaaccgtattactctacagtagctctggctattcgagatgaacattcatctggcatttttaatatccgtcaagagagttatctggtaagttcattatctgaaataacatatagattttatctaattaatctaaaatctgatcttgttcaatggagtgctagtacgggcgctgtaattaatcaaatggtaaatactgtattgattacagtgtatgaaaagttacaactggtcatagaaaatgattcacaatttacatgttcattggctgtggaatcagaacttccaataaaattacttaaagatagaaatgaattatttacaaaattcatcaacgagttaaaaaagaccagttcattcaagataagcaaacgcgataaggatacgctactaaaatattttacttaggactggagttagaatttatagacgactcatttcgtttatcattattactaccatcattattagtattcttcttgttatcttgttcagaaatatacagcaatgctatgcctaatactaaatacattatcatgcttgcaatggctctaacaacgacgaaccaaaatgaatttggtcgtagcttttgttcacaaaaatacataaagaaatgtctacataaatctatggcgccattggctacttgaaatagcgccagtcctcctacagattttaatatagctgtataacatgacatttattcatcatcaaaagagacagagtcaccatctgtcatatttagattttttttcatgtgttcaaagtatcctctactcatttcattataatagtttatcatacttagaattttaggacggatcaatgagtaagacttgactagatcgtcagtagtaatttgtgcatcgtctattctgcatccgcttcgtcgaataatgtatagcatcgctttgagattctccatagctatcaagtctttatacaatgacatggaaatatctgtgaatactttatacttctccaacatcgatgccttaacatcatcgcctactttagcattgaaaatacgttctattgtgtagatggatgtagcaagatttttaaacaacaatgccatcttacacgatgattgcctcaagtctccaatcgtttgtttagaacgattagctacagagttcaacgcttggctgactagcatattattatctttagaaattgtattcttcaatgaagcgtttatcatatctgtgatttcgttagtcatattacagtctgactgggttgtaatgttatccaacatatcacctatggatacggtacacgtaccagcatttgtaataatcctatctaagatgttgtatggcattgcgcagaaaatatcttctcctgtaatatctccactctcgataaatctactcagattattcttaaatgccttattctctggagaaaagatatcagtgtccatcatttcattaatagtatacgcagaaaagataccacgagtatcaattctatccaagatacttatcggttccgagtcacagataatggtttcctctccttcgggagatcctgcatagaaatatctaggacaatagtttctatactgtctgtaactctgataatctctaaagtcactaactgataccatgaaattgagaagatcaaacgctgaagtaatcaatttttctgcctcgtttttactacaactagttttcatcaatgtagtgacgatgtattgtttagttactcttggtctaatactgatgatagagatattattacttcccataatggatcttctagtagtcaccttaaagcccattgatgcaaatagcagatagataaagtcttggtatgactcctttctaatatagtacggactacctttgtcacccaactttatacccacataagccataacaacctctttaatagccgtttcatgaggtttatcagccatgagcctgagtagttggaagaatctcatgaatcccgtctcagaaagtcctatatgcatgatagatttatctttcctgggaaactctcgtatagtcatagatgaaatactcttcaaagtttctgaaataagattagtaacagtcttacctccgactactctgggtaacaaacatactctaataggtgttttctctgcggagataatatcagaaaggatagagcaataagtagtattattgtgattataaagaccgaatacataacaggtagaatttataaacatcatgtcctgaaggtttttagacttgtattcctcgtaatccataccgtcccaaaacatggatttggtaactttgatagccgtagatctttgttccttcgccaacaggttaaagaaattaataaagaatttgttgtttctatttatgtccacaaattgcacgtttggaagcgtaactgttacgttcactgcagcattttgaggatcgcgagtatgaagtacgatgttattgtttactggtatatctggaaagaaatctaccagtctaggaataagagattgatatcgcatagaaatagtaaagtttataatctcatcatcgaagagcattttgttaccattgtaataaatatccactctgtcatatgtataaatgaagtactgttcaaacatgatgagatgtttatatgttggcatagtagtgagatcgacgtttggtaatggcaatgtattaagattaactccataatgtctagcagcatctgcgatgttataagtgtcgtcaaagcggggtcgatcttgtgctgttatatattgtctaacacctataagattatcaaaatcttgtctgcttaatacaccgttaacaatttttgccttgaattcttttattggtgcattaataacatccttatagaggatgttaaacaaataagtgttatcaaagttaagatctggatatttcttttctgctagaacatccattgagtcggagccatctggtttaatataaccaccgataaatctagctctgtattctgtatccgtcaatctaatattaagaaggtgttgagtgaaaggtggaagatcgtaaaagctgtgagtattaatgataggattagtttccgaactaatgttaattggggtattaataatatctatatttccagcgttaagtgtaacattaaacagttttaattcacgtgacgtggtatcaattaaataattaatgcccaatttggatatagcagcctgaagctcatcttgtttagttacggatcctaatgagttattaagcaatatatcgaacggatgaacgaaggttgttttaagttggtcacatactttgtaatctagacatagatgcggaagaacggtagaaactatacgaaataaatattcagagtcctctaattgatcaagagtaactattgacttaataggcatcatttatttagtattaaatgacgaccgtaccagtgacggatatacaaaacgatttaattacagagttttcagaagataattatccatctaacaaaaattatgaaataactcttcgtcaaatgtctattctaactcacgttaacaacgtggtagatagagaacataatgccgccgtagtgtcatctccagaggaaatatcctcacaacttaatgaagatctatttccagatgatgattcaccggccactattatcgaacgagtacaacctcatactactattattgacgatactccacctcctacttttcgtagagagttattaatatcggaacaacgtcaacaacgagaaaaaagatttaatattacagtatcgaaaaatgctgaagcaataatggaatctagatctatgataacttctatgccaacacaaacaccatccttgggagtagtttatgataaagataaaagaattcagatgttagaggatgaagtggttaatcttagaaatcaacgatctaatacaaaatcatctgataatttagataattttaccaaaatactatttggtaagactccgtataaatcaacagaagttaataagcgtatagccatcgttaattatgcaaatttgaacgggtcccccttatcagttgaggacttggatgtttgttcggaggatgaaatagatagaatctataaaacgattaaacaatatcacgaaagtagaaaacgaaaaattatcgtcactaacgtgattattattgtcataaacattatcgagcaggcattgctaaaactcggatttgaagaaatcaaaggactgagtaccgatatcacttcagaaattatcgatgtggagatcggagatgactgcgatgctgtagcatctaaactaggaatcggtaacagtccggttcttaatattgtattgtttatactcaagatattcgttaaacgaattaaaattatttaatttaatacattcccatatccagacaacaatcgtctggattaatctgttcctgtcgtctcataccggacgacatattaatctttttattagtaggcatctttttagatggtttctttttcccagcattaactgagtcgatacctagaagatcgtgattgatctctccgaccattccacgaacttctaattggccgtctctgacggtaccataaactattttaccagcattagtaacagcttggacaatctgaccatccattgcgttgaatgatgtagttgctgttgttctacgtttaggagcaccagaagtatttttggagcccttggaggctgatgtagaagaagacgaggattttgatttacatgtaatacattttgtactctttgattttgtatcacatgcgccggcagtcacatttgtttgagaattaagattattgttgcctcctttgacggctgcatctccaccgatttgcgctagtagatttttaagctgtggtgtaatcttattaactgtttcgatataatcatcgtaactgcttctaacggctaaattttttttatccgccatttagaagctaaaaatatttttatttatgcagaagatttaactagattatacaatgaactaatatgatccttttccagattatttacaaacttggtattttttggttctggaggaggcgaatttaaattcggacttggattcggattttgtgagttcttgatcttattatacatcgagtataggatggcgacggtaactgctacgcaaataccgatcaacaaaagaataccaatcatttattgacaataacttcactattgatcaagtatgcaatatatcatcttttcactaaataagtagtaataatgattcaacaatgtcgagatatatggacgataataatttagttcatggaaatatcgctatgattggtatgaatgactccgctaactctgtggggtgcgcagtgctttccccacatagaataaattagcattccgactgtgataataataccaagtataaacgccataatactcaatactttccatgtacgagtgggactggtagacttactaaagtcaataaaggcgaagatacacgaaagaatcaaaagaatgattccagcgattagcacgccggaaaaataatttccaatcataagcatcatgtccatttaactaataaaaattttaaatcgccgaatgaacaaagtggaatataaaccatataaaaacaatagtttgtactgcaaaaataatatctatttttgttttcgaagatatggtaaaattaaatagtagtacacagcatgttataactaacagcagcaacggctcgtaattacttatcatttactagacgaaaaggtggtgggatattttcttgctcaaataatacgaatatatcacccatccattttatgcgatgtttatatactctaatctttaatagatctatagacgacgggtttaccaacaatatagattttatcgattcatctaatttaaacccttccttaaacgtgaatgatctattatctggcataacgatgactctacctgatgaatcggacaatgtactgggccatgtagaataaattatcaacgaattatcgtctacgaacatttatatcatttgttttaattttaggacgcgaataaatggatataaaatagaaaataacagatattacaaccaatgttatggccgcgcccaaccaggtaggcagttttattttatcttttactacaggttctcctggatgtacgtcaccaacggcggacgtagttctagtacaattagacgtaagttctgcttgggaattttttaacgctaaagagttaacgttaatcgtgcacccaacgtatttacatctagttctttgaacatcttgattataatataaccattttctatctctagattcgtcggtgcactcatgtaaccaacataccctaggtcctaaatatttatctccggaattagattttggataattcgcgcaccaacaatttctatttcctttatgatcgttacaaaagacgtataatgccgtatccccaaaagtaaaataatcaggacgaataattctaataaactcagaacaatatctcgcatccatatgtttggagcaaatatcggaataagtagacatagccggtttccgttttgcacgtaaccattctaaacaattggggtttccaggatcgtttctacaaaatccagtcatgaaatcatcacaatgttctgtcttgtaattattattaaatatttttggacagtgtttggtatttgtcttagaacaacattttgccacgctatcactatcgcccaggagataatccttttttataaaatgacatcgttgcccggatgctatataatcagtggcgtgttttaaatccttaatatattcaggagttacctcgttctgataatagattaatgatccaggacgaaatttgaaagaactacatggttctccatgaattaatacatattgtttagcaaattcaggaactataaaactactacaatgatctatcgacataccatctatcaaacaaaacttgggtttaatttctcccggagatgtttcataatagtacgtataactttcttctgcaaacttaacagctctattatattcaggataattaaaacctaattccatatatttgtctcgtatatctgctattcctggtgctattttaattctattaagagtaacggctgcccccattcttaataatcgtcagtatttaaactgttaaatgttggtatatcaacatctaccttatttcccgcagtataaggtttgttgcaggtatactgttcaggaatggttacatttatacttcttctatagtcctgtctttcgatgttcatcacatatgcaaagaacagaataaacaaaataatgtaagaaataatattaaatatctgtgaattcgtaaatacattgattgccataataattacagcagctacaatacatacaatagacattcccacagtgttgccattacctccacgatacatttgagttactaagcaataggtaataactaagctagtaagaggcaatagaaaagatgagataaatatcatcaatatagagattagaggagggctatatagagccaagacgaacaaaatcaaaccgagtaacgttctaacatcattatttttgaagattcccaaataatcattcattcctccataatcgttttgcattatacctccatctttaggcataaacgattgctgctgttcctctgtaaataaatctttatcaagcactccagcacccgcagagaagtcgtcaagcatattgtaatatcttaaataactcatttatatattaaaaaatgtcactattaaagatggagtataatctttatgccgaactaaaaaaaatgacttgtggtcaacccctaagtctttttaacgaagacggggatttcgtagaagttgaaccgggatcatcctttaagtttctgatacctaagggattttacgcctctccttccgtaaagacgagtctagtattcgagacattaacaacgaccgataataaaatcactagtatcaatccaacaaatgcgccaaagttatatcctcttcaacgcaaagtcgtatctgaagtagtttctaatatgaggaaaatgatcgaatcaaaacgtcctctatacattactcttcacttggcgtgtggatttggtaagactattaccacgtgttatcttatggctacacacggtagaaaaaccgtcatttgcgtacccaataaaatgttaatacatcaatggaagacacaggtagaggcagtcggattggaacataagatatctatagatggagtaagtagtctattaaaggaactaaagactcaaagtccggatgtattaatagtagtcagtagacatctgacaaacgatgccttttgtaaatatatcaataagcattatgatttgttcatcttggatgaatcacatacgtataatctgatgaacaatacagcagttacaagatttttagcgtattatcctccgatgatgtgttattttttaactgctacacctagaccagctaaccgaatttattgtaacagtattattaatattgccaagttatccgatctaaaaaaaactatctatgcggtagatagtttttttgagccatattccacagacaatattagacatatggtaaaacgactagatggaccatctaataaatatcatatatatactgagaagttattatctgtagacgagcctagaaatcaacttattcttgataccctggtagaagaattcaagtcaggaactattaatcgaattttagttattactaaactacgtgaacatatggtattcttctacaaacgattattagattttttcggatcagaggttgtatttataggagacgcccaaaatagacgtactccagatatggtcaaatcaatcaaggaactaaatagatttatattcgtatccaccttattttattccggtactggtttagatattcctagtttggattcgttgttcatttgctcggcagtaatcaacaatatgcaaatagagcaattactagggagggtatgtcgagaaacagaactattagataggacggtatatgtatttcctaacacatccatcaaagaaataaagtacatgataggaaatttcatgcaacgaattattagtctgtctgtagataaactaggatttaaacaaaaaagttatcggaaacatcaagaatccgatcccacttctgtatgtacaacatcctccagagaagaacgtgtattaaatagaatatttaactcgcaaaatcgttaagaagtttaagcgacgatccgcatgctgcgcaggccagtgtattacccctcatagtattaatataatccaatgatacttttgtgatgtcggaaatcttaaccaatttagactgacaggcagaacacgtcatgcaatcatcatcgtcatcgataactgtagtcttgggcttctttttgcggctcttcattccggaacgcacattggtgctatccatttaggtagtaaaaaataagtcagaatatgccctatagcacgatcgtgcaaaacctggtatatcgtctctatctttatcacaatatagtgtatcgacatttttattattattgacctcgtttatcttggaacatggaatgggaacatttttgttatcaacggccatctttgccttaattccagatgttgtaaaattataactaaacagtctatcatcgacacaaatgaaattcttgtttagacgtttgtagtttacgtatgcggctcgttcgcgtctcattttttcagatattgcaggtactataatattaaaaataagaatgaaataacataggattaaaaataaagttatcatgacttctagcgctgatttaactaacttaaaagaattacttagtctgtacaaaagtttgaaattttcagattctgcggctatagaaaagtataattctttggtagaatggggaacatctacttactggaaaataggcgtgcaaaaggtagctaatgtcgagacgtcaatatctgattattatgatgaggtaaaaaataaaccgtttaatattgatccgggatattacattttcttaccggtatattttggaagcgtctttatttattcgaagggtaaaaatatggtagaacttggatctggaaactcttttcaaataccagatgatatgcgaagtgcgtgtaacaaagtattagacagcgataacggaatagactttctgagatttgttttgttaaacaatagatggataatggaagatgctatatcaaaatatcagtctccagttaatatatttaaactagctagtgagtacggattaaacatacccaaatatttagaaattgaaatagaggaagacacattatttgacgacgagttatactctattatagaacgctctttcgatgataaatttccaaaaatatccatatcgtatattaagttgggagaacttagacggcaagttgtagactttttcaaattctcgttcatgtatattgagtccatcaaggtagatcgtataggagataatatttttattcctagcgttataacaaaatcaggaaaaaagatattagtaaaagatgtagaccatttaatacgatccaaggttagagaacatacatttgtaaaagtaaaaaagaaaaacacattttccattttatacgactatgatggaaacggaacagaaactagaggagaagtaataaaacgaattatagacactataggacgagactattatgttaacggaaagtatttctctaaggttggtagtgcaggcttaaagcaattgactaataaattagatattaatgagtgcgcaactgtcgatgagttagttgatgagattaataaatccggaactgtaaaacgaaaaataaaaaaccaatcagcatttgatttaagcagagaatgtttgggatatccagaagcggattttataacgttagttaataacatgcggttcaaaatagaaaattgtaaggttgtaaatttcaatattgaaaatactaattgtttaaataacccgagtattgaaactatatatggaaactttaaccagttcgtctcaatctttaatatcgtcaccgatgtcaaaaaaagattattcgagtgaaataatatgcgcctttgatataggtgcaaaaaatcctgccagaactgttttagaagtcaaggataactccgttagggtattggatatatcaaaattagactggagttctgattgggaaaggcgcatagctaaagatttgtcacaatatgaatacactacagttcttctagaacgtcagcctagaaggtcgccgtacgtcaaatttatctattttattaaaggctttttatatcatacatcggctgccaaagttatttgcgtctcgcctgtcatgtctggtaattcatatagagatcgaaaaaagagatcggtcgaagcatttcttgattggatggacacattcggattgcgagactccgttccggatagacgcaaattagacgatgtagcggatagtttcaatttggctatgagatacgtattagataaatggaatactaattatacaccttataataggtgtaaatctagaaattacataaaaaaaatgtaataacgttagtaacgccattatggataatctatttacctttctacatgaaatagaagatagatatgccagaactatttttaactttcatctaataagttgcgatgaaataggagatatatatggtcttatgaaagaacgcatttcctcagaggatatgtttgataatatagtgtataataaagatatacatcatgccattaagaaactagtgtattgcgacatccaacttactaaacacattattaatcagaatacgtatccggtatttaacgattcttcacaagtgaaatgttgtcattatttcgacataaactcagataatagcaatattagctctcgtacagtagagatatttgagagggaaaagtcatctcttgtatcatatattaaaactaccaataagaagagaaaggtcaattacggcgaaataaagaaaactgttcatggaggcactaatgcaaattacttttccggtaaaaagtctgacgagtatctgagtactacagttagatccaacattaatcaaccttggatcaaaaccatctctaagaggatgagagttgatatcattaatcactctatagtaacgcgtggaaaaagctctatattacaaactatagaaattatttttactaatagaacatgtgtgaaaatattcaaggattctactatgcacattattctatccaaggacaaggatgaaaaggggtgtatacacatgattgacaaattattctatgtctattataatttatttctgttgttcgaggatatcatccaaaacgagtactttaaagaagtagctaatgttgtaaaccacgtacttacggctacggcattagatgagaaattattcctaattaagaaaatggctgaacacgatgtttatggagttagcaatttcaaaatagggatgtttaacctgacatttattaagtcgttggatcataccgttttcccctctctgttagatgaggatagcaaaataaagttttttaaggggaaaaagctcaatattgtagcattacgatctctggaggattgtataaattacgtgactaaatccgagaatatgatagaaatgatgaaggaaagatcgactattttaaatagcatagatatagaaacggaatcggtagatcgtctaaaagaattgcttctaaaatgaaaaaaaacactgattcagaaatggatcaacgactcggatataagtttttggtgcctgatcctaaagccggagttttttatagaccgttacatttccaatatgtatcgtattctaattttatattgcatcgattgcatgaaatcttgaccgtcaagcggccactcttatcgtttaagaataatacagaacgaattatgatagaaattagcaatgttaaagtgactcctccagattactcacctataatcgcgagtattaaaggtaagagttatgacgcattagccacgttcactgtaaatatctttaaagaggtaatgaccaaagagggtatatccatcactaaaataagtagttatgagggaaaagattctcatttgataaaaattccgctactaataggatacgggaataaaaatccacttgatacagccaagtatcttgttcctaatgtcataggtggagtctttatcaataaacaatctgtcgaaaaagtaggaattaatctagtagaaaagattacaacatggccaaaatttagggttgttaagccaaactcattcactttctcgttttcctccgtatcccctcctaatgtattaccgacaagatatcgccattacaagatatctctggatatatcacaattggaagcgtcgaatatatcatcgacaaagacatttataacggtcaatattgttttgctgtctcaatatttatctagagtgagtctagaattcattagacgtagcttatcatacgatatgcctccagaagttgtctatctagtaaacgcgataatagatagtgctaaacgaattactgaatctattactgactttaatattgatacatacattaatgacctggtggaagctgaacacattaaacaaaaatctcagttaacgatcaacgagttcaaatatgaaatgctgcataactttttacctcatatgaactatacacccgatcaactaaagggattttatatgatatctttactaagaaagtttctctactgtatctaccacacttctagatatccagatagagattcgatggtttgtcatcgtatactaacatacggcaaatattttgagacgttggcacatgatgaattagagaattacataggcaacatccgaaacgatatcatgaacaatcacaagaacagaggcacttacgcggtaaacattcatgtactaacaactcctggacttaatcatgcattttctagtctattgagtggaaagttcaaaaagtcagacggtagttatcgaacacatcctcactattcatggatgcagaatatttctattcctaggagtgttggattttatccggatcaagtaaagatttcaaagatgttttctgtcagaaaataccatccaagtcaatatctttacttttgttcatcagacgttccggaaagaggtcctcaggtaggtttagtatctcaattgtctgtcttgagttccattacaaatatactaacgtctgagtatttggatttggaaaagaaaatttgtgagtatatcagatcatattataaagatgatataagttactttgaaacaggatttccaatcactatagaaaatgctctagtcgcatctcttaatccaaatatgatatgtgattttgtaactgactttagacgtagaaaacggatgggattcttcggtaacttggaggtaggtattactttagttagggatcacatgaatgaaattcgcattaatattggagcgggaagattagtcagaccattcttggttgtggataacggagagctcatgatggatgtgtgtccggagttagaaagcagattagacgacatgacattctctgacattcagaaagagtttccgcatgtcatcgaaatggtagatatagaacaatttacttttagtaacgtatgtgaatcggttcaaaaatttagaatgatgtcaaaggatgaaagaaagcaatacgatttatgtgactttcctgccgaatttagagatggatatgtggcatcttcattagtgggaatcaatcacaattctggacccagagctattcttggatgtgctcaagctaaacaagctatctcttgtctgagctcggatatacgaaataaaatagacaatggaattcatttgatgtatccagagaggccaatcgtgattagtaaggctttagaaacttcaaagattgcggctaattgcttcggccaacatgttactatagcattaatgtcgtacaaaggtatcaatcaagaggatggaattatcatcaaaaaacaatttattcagagaggcggtctcgatattgttacagccaagaaacatcaagtagaaattccattggaaaactttaataacaaagaaagagataggtctaacgcctattcaaaattagaaagtaatggattagttagactgaatgctttcttggaatccggagacgctatggcacgaaatatctcatcaagaactcttgaagatgattttgctagagataatcagattagcttcgatgtttccgagaaatataccgatatgtacaaatctcgcgttgaacgagtacaagtagaacttactgacaaagttaaggtacgagtattaaccatgaaagaaagaagacccattctaggagacaaatttaccactagaacgagtcaaaagggaacagtcgcgtatgtcgcggatgaaacggaacttccatacgacgaaaatggtatcacaccagatgtcattattaattctacatccatcttctctagaaaaactatatctatgttgatagaggttattttaacagccgcatattctgctaagccgtacaacaataagggagaaaaccgacctgtctgttttcctagtagtaacgaaacatccatcgatacatatatgcaattcgctaaacaatgttatgagcattcaaatccgaaattgtctgatgaagaattatcggataaaatcttttgtgaaaagattctctatgatcctgaaacggataagccttatgcatccaaagtattttttggaccaatttattacttgcgtctgagacatttaactcaggacaaggcaaccgttagatgtagaggtaaaaagacgaagctcattagacaggcgaatgagggacgaaaacgtggaggaggtatcaagttcggagaaatggagagagactgtttaatagcgcatggtgcagccaatactattacagaagttttgaaagattcggaagaagattatcaagatgtgtatgtttgtgaaaattgtggagacatagcagcacaaatcaagggtattaatacatgtcttagatgttcaaaacttaatctctctcctctcttaacaaaaattgataccacacacgtatctaaagtatttcttactcaaatgaacgccagaggcgtaaaagtcaaattagatttcgaacgaagacctccttcgttttataaaccattagataaagttgatctcaaaccgtcttttctggtctaatattgtttagtagatacttatcaacatcatcaagattatcaagattatcaagattatcaagataagctaattcactaaacacattatcgatttcggtatcgttactcgcagaataaagttcgttatgatcctgatattcggaaatctgtggagtttcaggttttggtggatgtgtaacagctacttgagataccgaagtctgatattcagaaagctgtggatgttctggttcggcatccaccgatggtgttacaccactactaattggttcagtaacgtctgtggacgatggaggcaccacttctacaggttctggttctttatcctcagtcatcaacggagctacttcaatgcgaggaaatgtataatttggtaatggtttctcatgtggatctgaagaagaggtaagatatctactagaaagataccgatcacgttctagttctcttttgtagaacttaactttttctttctcagcatctagttgatattccaacctcttcacgttactacgttcagatttcaattcacgttcgcatgggttacctccgcagtttttacgagcgatttcacgttcagccttcatgcgtctctccctctctctatcgagtttatcagagcagtctttctgaaggcgatcgaactccataaatttctccaacgctttgattgtttccatagatttccgaagttcagcttttaggactgtgattctttttctttcgaattcacagctggatgtacaaccgtttccattaccgccatctctaagtttcttttctagatcggcaacatttcatccccatgccttttacattcctcgagtctactgtcgtcgaaatatcgttccagctccttttcgacatcaataactttagcacgttgtctctcaagctctcttttgtagttatctgattccctggcacgtttaagatcttcatgcaattgagtcagctcttaacacaatctcttgcttcttcgtcatagtacgcgcaatcactgtgagatccattgttaccacgtctacactcggcgagctcgcgtttaagagattcaatttcccgtttgtattggtccatgtttccattgctaccaccattagatttacaggctgctagttgtcgttcgagatcagaaatacgggttttcttggaattgatttcgtcgatgtacttggcatcgaaacacttattaagttctttttccaattctacgattttatttctttcgcgagtcaattccctcctgtagtaactatctgttttgtcagattcacgctctctacgtagactttcttgcaagttactaatttgttccctagcacgtccgagtttagttttatatgctgaatagagttctgattcatcctttgagcagatctctagcgatcgtttaagattcctgattctagtctttagcctatttacctcctcagaagatgttccgttaccgttgcgtttacactcgttaagctgtctatcaagatccatgattctatctctaagacgttgcatctctctttccatatcagcattgctttcattattacgtctgcagtcactcaactgtctttcaatatctgagattctatctctaagacgtcgcatctctctctgtttcggcattggtttcattattacgtctacagtcgttcaactgtctttcaagatctgatattctagattggagtctgctaatctctgtagcattttcacggcattcactcagttgtctttcaagatctgaaattttagattggagtctgctaatctctgtaagatttcctcctccgctctcgatgcagtcggtcaacttattctctagttctctaatacgcgaacgcagtgcatcaacttcttgcgtgtcttcctggttgcgtgtacattcatcgagtctagattcgagatctctaacgcgtcgtcgttcttcctcaagttctctgcgtactacagaaagcgtgtccctatcttgttgatatttagcaatttctgattctagagtactgattttgcttacgtagttactaatatttgtcttggccttatcaagatcctccttgtatttgtcgcattccttgatatccctacgaagtctggacagttcccattcgacattacgacgtttatcgatttcagctcggagatcgtcatcgcgttgttttagccacatacgactgagttcaagttctcgttgacaagatccatctacttttccattcctaatagtatccagttccttttctagttctgaacgcatttctcgttccctatcaagcgattctctcaattctcggatagtcttcttatcaatttctaataaatctgaaccatcatctgtcccattttgaatatccctgtgttctttgatctcttttgtaagtcggtcgattctttcggttttataaacagaatccctttccaaagtcctaatcttactgagtttatcactaagttctgcattcaattcggtgagttttctcttggcttcttccaactctgttttaaactctccactatttccgcattcttcctcgcatttatctaaccattcaattagtttattaataactagttggtaatcagcgattcctatagccgttcttgtaattgtgggaacataattaggatcttctaatggattgtatggcttgatagcatcatctttatcattattagggggatggacaaccttaattggttggtcctcatctcctccagtagcgtgtggttcttcaatagccgtgttagtaataggcttaggcaaatgcttgtcgtacgcgggcacttcctcatccatcaagtatttataatcgggttctacgtctgaatattcttttctaagagacgcaacttctggagttagtagaagaactctgtttctatatctatcaacgctggaatcaatactcaagttaaggatagcgaatacctcatcgtcatcatccgtatcctctgaaacgccatcatatgacatttcatgaagtctaacgtattgataaacagaatcagatttagtattaaacagatccttaacctttttagtaaatgcatatgtatattttagatctccagatttcataatatggtcgcatgccttaaatgtcagtgcttccataatatagtctggaacactaattggtgatgaaaaagataccggaccatatgctacgttgataaataactctgagccactaactagataatgattaatgttaaggaagaggaaatattcagtgtataggtatgtcttggcgtcatatcttgtactaaacacgctaaacagtttgttaatgtgatcaatttccaatagattaattagagcagcaggaataccaacaaacatattaccacatccgtattttctatgaatatcacatatcatgttaaaaaatcttgatagaagagcgaatatctcgtctgacttaatgagtcgtagttcagcagcaacataagtcataactgtaaatagaacatactttcctgtagtgttgattctagactccacatcaacaccattattaaaaatagttttatatacatctttaatctgctctccgttaatcgtcgaacgttctagtatacggaaacactttgatttcttatctgtagttaatgacttagtgatatcacgaagaatattacgaattacatttcttgtttttcttgagagacctgattcagaactcaactcatcgttccatagtttttttacctcagtggcgaaatctttggagtgcttggtacatttttcaataaggttcgtgacctccatttattataaaaaaattttattcaaaacttaactacaatcgggtaattataaaatcgtagatctcccatgtggtggaatactaccatctatcgcatgtggatggacagtaggtaatggccatgggaacagtaatgtttgcatatttatctttcttgccagtattactgcatattgtcccaatgtttcgatgtgatgttctaacctatcaactgccgctgtatcacaacaatagtgtccgatgaaattaagattatgatccaatgtgtttaatatatgattatcaagtcttatacgatccgcgtcttttttgacaggatcaggttcttctacaggaagaagtttcggcctcttatgatattcatgtctgggaaacggtggtctagggtgaggctccggtatcggagtgggttttggattataatcatcatcgtctatgacatcatcttcgacttcgatatttattttgctatcttgatgatgtcctgtatcagttgcattttcagcactcgactgaatattagcgcattcattgtttattattaccatatttctaaacccaaaatgtatatgttgaacatcagtactatcgttgatgagtcttatagcatgaattcgcttatcgttatcgggtttagcttctgtcaccttagcaattccttttttattaaactctacataatcatatccatttctattgtttgttctaatataaacgagtatagcatcattgctaaatttttcaatagtatcgaaaacagaatatcctaaaccatataatatatattcaggaacactcaaactaaatgtccaggattctcctaaatacgtaaactttaatagtgcgaaatcattcaaaaatctaccacttatagatagatagtacataaatgcgtatagtagtctacctatctctttattatgaaaaccggcattacgatcatatatgtcgtgatatacctgtgatccgtttacgttaaaccataaatacatgggtgatcctataaacatgaatttatttctaattctcagagctatagttaattgaccgtgtaatatttgcttacatgcatacttgatacgctcattaataagatttttatcattgctcgttatctcagaatcgtatatataaggagtaccatcgtgattcttaccagatattatacaaaatactatatataaaatatattgaccaacgttagtaatcatataaatgtttaacgttttaaattttgtattcaatgatccattatcatacgctagcatggtcttatgatattcattctttaaaatataatattgtgttagccattgcattggggctcctaatggagattttttattctcatccattttaggataggctttcataaagtccctaataacttcgtgaataatgtttctatgttttctactgatgcatgtatttgcttcgatttttttatcccatgtttcatctatcatagatttaaacgcagtaatgctcgcaacattaacatcttgaaccgttggtacaattccgttccataaatttataatgttcgccatttatataactcattttttgaatatacttttaattaacaaaagagttaagttactcatatggacgccgtccagtctgaacatcaatctttttagccagagatatcatagccgctcttagagtttcagcgtgattttccaacctaaatagaacttcatcgttgcgtttacaacacttttctatttgttcaaactttgttgttacattagtaatctttttttccaaattagttagccgttgtttgagagtttcctcattgtcgtcttcatcggctttaacaattgcttcgcgtttagcctctggctttttagcagcctttgtagaaaaaaattcagttgctggaattgcaagatcgtcatctccggggaaaagagttccgtccatttaaagtacagattttagaaactgacactctgcgttatttatatttggtacaacacatggattataaatattgatgttaataacatcagaaaatgtaaagtctatacattgttgcatcgtgttaaattttctaatggatctagtattattgggtccaacttctgcctgaaatccaaatatggaagcggatacaaaaccgtttcctggataaaccacacatctccacttttgctttacatcagaaattgtgtcattgacatcttgaactctcctatctaatgccggtgttccacctatagattttgaatattcgaatgctgcatgagtagcattaaattccttaatattgccataattttcatatattgagtaaccctggataaaaagtaaacacaccgcagccgtcgctaccacaataaaaaaaattgatagagagttcatttataatctattagaagctgacaaaatttttttacacgcatcagacaatgctttaataaatagttcaacatctacttttgtcatatcgaaccgatggtatgattctaacctagaattacatccgaaaaagttgactatgttcatagtcattaagtcattaacaaacaacattccagactctggattataagacgatactgtttcgtcacaattacctaccttaatcatgtgattatgaatattggctattagagcaccttctaagaaatctataatatctttgaaacacgatttaaaatcaaaccacgaatatacttctacgaagaaagttagtttacccataggagaaataactataaatggagatctaaatacaaaatccggatctatgatagttttaacattattatattctctattaaatacctccacatctaaaaatgttaattttgaaactatgtcttcgtttattaccgtacctgaactaaacgctataagctctattgtttgagaactctttaaacgatattcttgaaatacatgtaacaaagtttcctttaactcggtcggtttatctaccatagttacagaatttgtatccttatctataatataataatcaaaatcgtataaagttatataattatcgcgttcagattgtgatcttttcaaatagactaaaaaccccatttctctagtaagtatcttatgtatatgtttgtaaaatatcttcatggtgggaatatgctctaccgcagttagccattcctcattgacagcggtagatgtattagacaaaactattccaatgtttaacaagggccattttacgagattattaaatccttgtttgataaatgtagccaatgagggttcgagttcaacgacgattgaattctcttcccgcggatgctgcatgatgaacgacgggatgttgttcgattgatttggaattctttttcgactttttgtttatattaaatattttaaaatttatagctgatagcaattcatgtactacggataatgtagacgcgtattgcgcatcgatatctttattattagataaatttatcaataaatgtgagaagtttgcctcgttaaggtcttccatttaaatattatataaacatttgtgtttgtatcttattcgtcttttatggaatagttttttactagtaaagctgcaattacacactttgtccgtaaaacataaatataaacaccagcttttatcaatcgttccaaaaagtcgacggcggacatttttaacatggcatctattttaaatacacttaggtttttggaaaaaacatcattttataattgtaacgattcaataactaaagaaaagattaagattaaacataagggaatgtcatttgtattttataagccaaagcattctaccgttgttaaatacttgtctggaggaggtatatatcatgatgatttggttgtattggggaaggtaacaattaatgatctaaagatgatgctattttacatggatttatcatatcatggagtgacaagtagtggagcaatttacaaattgggatcgtctatcgatagactttctctaaataggactattgttacaaaagttaataattatgatgatacattttttgacgacgatgattgatcgctattgcacaattttgtttttttactttctaatatagcgtttagattctttttcatgtgcgaatattgatttactaaaatatcgatgtttaacttttgttctatgacgtccttatcagcggtatcggtacatatacgtaattcaccttcacaaaatacggagtcttcgataataatagccaatcgattattggatctagcggtctgtatcatattcaacatgtttaatatatcctttcgtttcccctttacaggcatcgatcgtagcatattttccgcgtctgagatggaaatgttaaaactacaaaaatgcgtaatgttagcccgtcctaatattggtacgtgtctataagtttggcatagtagaataatagacgtgtttaaatgccttccaaagtttaagaattctattagagtattgcattttgatagtttatcgcctacatcatcaaaaataagtaaaaagtgtgctgattttttatgattttgtgcgacagcaatacatttttctatgttacttttagttcgtatcagattatattctagagattcctgactactaacgaaattaatatgatttggccaaatgtatccatcataatctggattataaacgggtgtaaacaagaatatatgtttatattttttaactagtgtagaaaacagagatagtaaatagatagtttttccagatccagatcctcccgttaaaaccattctaaacggcatttttaataaattttctcttgaaaattgtttttcttggaaacaattcataattatatttacagttactaaattaatttgataataaatcaaaatatggaaaactaaggtcgttagtagggaggagaacaaagaaggcatatcgtgatataaataacatttattatcatgatgacaccagaaaacgacgaagagcagacatctgtgttctccgctactgtttacggagacaaaattcagggaaagaataaacgcaaacgcgtgattggtctatgtattagaatatctatggttatttcactactatctatgattaccatgtccgcgtttctcatagtgcgcctaaatcaatgcatgtctgctaacgaggctgctattactgacgccgctgttgccgttgctgctgcatcatctactcatagaaaggttgcgtctagcactacgcaatatgatcacaaagaaagctgtaatggtttatattaccagggttcttgttatatattacattcagactaccagttattctcggatgctaaagcaaattgcactgcggaatcatcaacactacccaataaatccgatgtcttgattacctggctcattgattatgttgaggatacatggggatctgatggtaatccaattacaaaaactacatccgattatcaagattctgatatatcacaagaagttagaaagtatttttgtgttaaaacaatgaactaatatttatttttgtacattaataaatgaaatcgcttaatagacaaactgtaagtaggtttaagaagttgtcggtgccggccgctataatgatgatactctcaaccattattagtggcataggaacatttctgcattacaaagaagaactgatgcctagtgcttgcgccaatggatggatacaatacgataaacattgttatctagataccaacattaaaatgtctacagataatgcggtttatcagtgtcgtaaattacgagctagattgcctagacctgatactagacatctgagagtattgtttagtattttttataaagattattgggtaagtttaaaaaagaccaataataaatggttagatattaataatgataaagatatagatattagtaaattaacaaattttaaacaactaaacagtacgacggatgctgaagcgtgttatatatacaagtctggaaaactggttgaaacagtatgtaaaagtactcaatctgtactatgtgttaaaaaattctacaagtgacaacaaaaaatgaattaataataagtcgttaacgtacgccgccatggacgccgcgtttgttattactccaatgggtgttgactataacagatacattgtatgatgatctcgatatctcaatcatggactttataggaccatacattataggtaacataaaaactgtccaaatagatgtacgggatataaaatattccgacatgcaaaaatgctactttagctataagggtaaaatagttcctcaggattctaatgatttggctagattcaacatttatagcatttgtgccgcatacagatcaaaaaataccatcatcatagcatgcgactatgatatcatgttagatatagaagataaacatcagccattttatctattcccatctattgatgtttttaacgctacaatcatagaagcgtataacctgtatacagctggagattatcatctaatcatcaatccttcagataatctgaaaatgaaattgtcgtttaattcttcattctgcatatcagacggcaatggatggatcataattgatgggaaatgcaatagtaattttttatcataaaagttgtaaagtaaataataaaacaataaatattgaactagtagtacgtatattgagcaatcagaaatgatgctggtacctcttatcacggtgaccgtagttgcgggaacaatattagtatgttatatattatatatttgtaggaaaaagatacgtactgtctataatgacaataaaattatcatgacaaaattaaaaaagataaagagttctaattccagcaaatctagtaaatcaactgatagcgaatcagactgggaggatcactgtagtgctatggaacaaaacaatgacgtagataatatttctaggaatgagatattggacgatgatagcttcgctggtagtttaatatgggataacgaatccaatgttatggcgcctagcacagaacacatttacgatagtgttgctggaagcacgctgctaataaataatgatcgtaatgaacagactatttatcagaacactacagtagtaattaatgaaacggagactgttaaagtacttaatgaagataccaaacagaatcctaactattcatccaatcctttcgtaaattataataaaaccagtatttgtagcaagtcaaatccgtttattacagaacttaacaataaatttagtgagaataatccgtttagacgagcacatagcgatgattatcttaataagcaagaacaagatcatgaacacgatgatatagaatcatcggtcgtatcattggtgtgattagtttcctttttataaaattgaagtaatatttagtattattgctgccgtcacgttgtacaaatggagatattccctgtattcggcatttctaaaattagcaattttattgctaataatgactgtagatattatatagatacagaacatcaaaaaattatatctgatgagatcaatagacagatggatgaaacggtacttcttaccaacatcttaagcgtagaagttgtaaatgacaatgagatgtaccatcttattcctcatagattatcgacgattatactctgtattagttctgtcggaggatgtgttatctctatagataatgacgtcaatggcaaaaatattctaacctttcccattgatcatgctgtaatcatatccccactgagtaaatgtgtcgtagttagcaagggccctacaaccatactggttgctaaagcggatatacccagcaaacgattggtaacatcgtttacaaacgacatactgtatgtaaacaatctatcactgattaattatttgccgttgtctgtattcattattagacgagtcaccgactatttggatagacacatatgcgatcagatatttgctaataataagtggtattcccttataaccatcgacgataagcaatatcctattccatcaaattgtataggtatgtcttctgccaagtacataaattctagcatcgagcaagatactttaatacatgtttgtaacctcgagcatccattcgacttagtatacaaaaaaatgcagtcgtacaattctgtacctatcaaggaacaaatattgtacggtagaattgataatataaatatgagcattagtatttctgtggattaatagatttctagtatggggatcattaatcatctctaatctctaaatacctcataaaacgaaaaaaaagctattatcaaatactgtacggaatagattcattctcttctctttttatgaaactctgttgtatatctactgataaaactggaagcaaaaaatctgataaaaagaataagatcaagatcaaggattatatggaacacgattattataaaataacaatagttcctggttcctcttccacgtctactagctcgtggtattatacacatgcctagtaatagtctctttgcgttgatggaaagcagactagaaataacaggctaaaatgttcagacaccataatagttcccaacccagataataacagagtaccatcaacacattcctttaaactcaatcccaaacccaaaaccgttaaaatgtatccggccaattgatagtagataatgaggtgtacagcgcatgataatttacacagtaaccaaaatgaaaatactttagtaattataagaaatatagatggtaacgtcatcatcaacaatccaataatatgccggagagtaaacattgacggataaaacaaaaatgctccgcataactctatcatggcaataacacaaccaaatacttgtaagattcctaaattagtagaaaatacaacggatatcgatgtataagtgatctcgagaaataataagaataaagtaatgcccgtaaagataaacatcaacattgtttggtaatcattaaaccaattagtatgacgttgaactaatttcacagtaaattttattccagtattatccccgcatgtataagtacctggtaagatatctttatattccataatcaatgagacatcactatctgataacgaatgaagtctagcactagtatgccatttacttaatattgtcgtcttggaagttttattataagttaaaatatcatggttatccaatttccatctaatatactttgtcggattatctatagtacacggaataatgatggtatcattacatgctgtatactctatggtctttgtagttgttataacaaccaacgtatagaggtatatcaacgatattctaactcttgacattttttatttatttaaaatgatacctttgttatttattttattctattttgctaacggtattgaatggcataagtttgaaacgagtgaagaaataatttctacttacttattagacgacgtattatacacgggtgttaatggggcggtatacacattttcaaataataaactaaacaaaactggtttaactaataataattatataacaacatctataaaagtagaggatgcggataaggatacattagtatgcggaaccaataacggaaatcccaaatgttggaaaatagacggttcagacgacccaaaacatagaggtagaggatacgctccttatcaaaatagcaaagtaacgataatcagtcacaacggatgtgtactatctgacataaacatatcaaaagaaggaattaaacgatggagaagatttgacggaccatgtggttatgatttattcacggcggataacgtaattccaaaagatggtttacgaggagcattcgtcgataaagacggtacttatgacaaagtttacattcttttcactgatactatcggctcaaagagaattgttaaaattccgtatatagcacaaatgtgcctaaacgacgaaggtggtccatcatcgttgtctagtcatagatggtcgacgtttctcaaagtcgaattagaatgtgatatcgacggaagaagttatagataaattattcattctaaaactataaaaacagataatgatacgatactatatgtattcttcgatagtccgcattatgtacctattctatgaataccattaaacaatctttttctacgtcaaaattggaaggatatacaaagcaattgccgtctccagctcctggtatatgtctaccagctggaaaagttgttccacataccacgtttgaagtcatagaaaaatataatgtactagatgatattataaagcctttatctaaccaacctatcttcgaaggaccgtctggtgttaaatggttcgatataaaggagaaggaaaatgaacatcgggaatatagaatatacttcataaaagaaaattctatatattcgttcgatacaaaatctaaacaaactcgtagctcgcaagtcgatgcgcgactattttcagtaatggtaacttcgaaaccgttatttatagcagatatagggataggagtaggaatgccacaaatgaaaaaaatacttaaaatgtaatcttaatcgagtacaccacacgacaatgaacaaacataagacagattatgctggttatgcttgctgcgtaatatgcggtctaattgttggaattatttttacagcgacactattaaaagttgtagaacgtaaattagttcatacaccatcaatagataaaacgataaaagatgcatatattagagaagattgtcctactgactggataagctataataataaatgtatccatttatctactgatcgaaaaaacctgggaggaaggacgtaatgcatgcaaagctctaaatccaaattcggatctaattaagatagagactccaaacgagttaagttttttaagaagccttagacgaggctattgggtaggagaatccgaaatattaaaccagacaaccccatataattttatagctaaaaatgccacgaagaatggaactaaaaaacggaaatatatttgtagtacaacgaatactcccaaactgcattcgtgttacactatataacaattacactacatttttatcataacactacttcggttagatgttttagaaaaaaataaatatcgccgtaccgttcttgtttttataaaaataacaattaacaattatcaaattttttctttaatattttacgtggttgaccattcttggtggtaaaataatctcttagtgttggaatggaatgctgtttaatgtttccgcactcatcgtatattttgacgtatgcagtcacatcgtttacgcaatagtcagactgtagttctatcatgcttcctacatcagaaggaggaacagttttaaagtctcttggttttaatctattgccattagttttcatgaaatcctttgttttatccacttcacattttaaataaatgtccactatacattcttctgttaattttactagatcgtcatgggtcatagaatttataggttccgtagtccatggatccaaactagcaaacttcgcgtatacggtatcgcgattagtgtatacaccaactgtatgaaaattaagaaaacagtttaataaatcaacagaaatatttaatcctccgtttgatacagatgcgccatatttatggatttcggattcacacgttgtttgtctgaggtgttcgtctagtgttgcttctacgtaaacttcgattcccatatattctttattgtcagaatcgcataccgatttatcatcatacactgtttgaaaactaaatggtatacacatcaaaataataaataataacgagtacattctgcaatattgttatcgtaattggaaaattagtgttcgagtgagtcggattatgtgagtactggattgtatattttattttatattttgtaataagaataaaatgctaatgtcaagtttattccaatagatgtcttattaaaaaacatatataataaataacaatggctgaatggcataaaattatcgaggatatctcaaaaaataataagttcgaggatgccgccatcgttgattacaagactacaaagaatgttctagctgctattcctaacagaacatttgccaagattaatccgggtgaaattattcctctcatcactaatcgtaatattctaaaacctcttattggtcagaaatattgtattgtatatactaactctctaatggatgagaacacgtatgctatggagttgcttactgggtacgcccctgtatctccgatcgttatagcgagaactcataccgcacttatatttttgatgggtaagccaacaacatccagacgtgatgtgtatagaacgtgtagagatcacgctacccgtgtacgcgcaactggtaattaaaataaaaagtaatattcatatgtagtgtcaattttaaatgatgatgatgaaatggataatatccatattgacgatgtcaataatgccggtattggcatacagctcatcgatttttagatttcattcagaggatgtggaattatgttatgggcatttgtattttgataggatctataatgtagtaaatataaaatataatccgcatattccatatagatataattttattaatcgcacgttaaccgtagatgaactagacgataatgtcttttttacacatggttattttttaaaacacaaatatggttcacttaatcctagtttgattgtctcattatcaggaaacttaaaatataatgatatacaatgctcagtaaatgtatcgtgtctcattaaaaatttggcaacgagtacatctactatattaacatctaaacataagacttattctctacatcggtccacgtgtattactataataggatacgattctattatatggtataaagatataaatgacaagtataatgacatctatgattttactgcaatatgtatgctaatagcgtctacattgatagtgaccatatacgtgtttaaaaaaataaaaatgaactcttaattatgctatgctattagaaatggataaaatcaaaattacggttgattcaaaaattggtaatgttgttaccatatcgtataacttggaaaagataactattgatgttacacctaaaaagaaaaaagaaaaggatgtattattagcgcaatcagttgctgtcgaagaggcaaaagatgtcaaggtagaagaaaaaaatattatcgatattgaagatgacgatgatatggatgtagaaagcgcataatacgatctataaaaataagtatataataaatactttttatttacggtactcttgtagtggtgataccctactcaattatttttttaaaaaaatacttattctgattcttctagccatttccgtgttcgttcgaatgccacatcgacgttaaagataggggagtagttgaaatctagttctgcattgttggtacgcacctcaaatgtagtgttggatatcttcaacgtatagttgttgagtagtgatggttttctaaatagaattctcttcatatcattcttgcacgcgtacatttttagcatccatcttggaattctagatccttgttctattcccaatggtttcatcaatagaagattaaacatatcgtacgaacacgatggagagtaatcgtagcaaaagtaagcatttcctttaatcttagatcccggatactggatatattttgcagccaacacgtgcatccatgcagcatttcctacatatacccggctatgcaccgcgtcatcatcgactgtacgatacataatgttaccgtgttgcttacattgctcgtaaaagactttcgtcaatttgtctccttctccgtaaattccagtgggtcttaggcaacaagtatacaattttgctccattcatgattacggaattattggctttcataaccagttgctcggccatacgtttactttttgcgtatacatgtcctggtgatatatcataaagggtatgctcatggccgatgaatggatcaccgtgtttattgggtcctattgcttccatgctactagtatagatcaaatacttgattcctaggtccacacaagctgccaatatagtctgtgttccataatagtttactttcatgatttcattatcggtgtattttccaaatacatccactagagcagccgtatgaataatcagatttaccccatctagcgcttctctcaccttatcaaagtcgtttatatcacattgtatatagtttataaccttaactttcgaggttattggttgtggatcttctacaatatctatgactctgatttcttgaacatcatctgcactaattaacagttttactatatacctgcctagaaatccggcaccaccagtaaccgcgtacacggccattgctgccactcataatatcagactacttattctattttactaaataatggctgtttgtataatagaccacgataatatcagaggagttatttactttgaaccagtccatggaaaagataaagttttaggatcagttattggattaaaatccggaacgtatagtttgataattcatcgttacggagatattagtcaaggatgtgattccataggcagtccagaaatatttatcggtaacatctttgtaaacagatatggtgtagcatatgtttatttagatacagatgtaaatatatttacaattattggaaaggcgttatctatttcaaaaaatgatcagagattagcgtgtggagttattggtatttcttacataaatgaaaagataatacattttcttacaattaacgagaatggcgtttgatatatcagttaatgcgtctaaaacaataaatgcattagtttacttttctactcagcaaaataaattagtcatacgtaatgaagttaatgatacacactacactgtcgaatttgatagggacaaagtagttgacacgtttatttcatataatagacataatgacaccatagagataagaggggtgcttccagaggaaactaatattggttgcgcggttaatacgccggttagtatgacttacttgtataataagtatagttttaaactgattttagcagaatatataagacacagaaatactatatccggcaatatttattcggcattgatgacactagatgatttggctattaaacagtatggagacattgatctattatttaatgagaaacttaaagtagactccgattcgggactatttgactttgtcaactttgtaaaggatatgatatgttgtgattctagaatagtagtagctctatctagtctagtatctaaacattgggaattgacaaataaaaagtataggtgtatggcattagccgaacatatatctgatagtattccaatatctgagctatctagactacgatacaatctatgtaagtatctacgcggacacactgagagcatagaggatgaatttgattattttgaagacgatgattcgtctacatgttctgccgtaaccgacagggaaacggatgtataattttttttatagcgtgaaggatatgataaaaaatataattgttgtatttatcccattccaatcaccttatatgattctgtaaaaaaattatactgtaacacaataaaggagtcttatagatgtatagaggtcagatactggtttgataaactgtttattccacataagtatgtttgactttatggttagacccgcatactttaacaaatcactgaaaattggagttaggtattgacctctcagaatcagttgccgttctggaacattaaatgtattttttatgatatactccaacgcatttatgtgggcatacaacaagtcattactaatggagtattccaagagttttagttgtctagtatttaacaagagaagagatttcaacagactgtttatgaactcgaacgccgcctcattgtcgcttatattgatgatgtcgaattctcccaatatcatcactgatgagtagctcatcttgttatcgggatccaagttttctaaagatgtcattaaaccctcgatcatgaatggatttatcatcatcgtttttatgttggacatgagcttagtccgtttgtccacatctatagacgacgatttctgaattatttcatatatccctctctttaactccaggaacttgtcaggatggtctactttaatatgttctcgtctaagagatgaaaatctttggatggttgcacgcgacttttctttaaaggatgacgttgcccaagatcctctcttaaatgaatccatcttatccttggacaagatggacagtctattttccttagatggtttaatatttttgttacccatgatctataaaggtagacctaatcgtctcggatgaccatatatttattttcagttttattatacgcataaattgtaaaaaatatgttaggtttacaaaaatgtctcgtggggcattaatcgtttttgaaggattggacaaatctggaaaaacaacacaatgtatgaacatcatggaatctataccggcaaacacgataaaatatcttaactttcctcagagatccactgtcactggaaagatgatagatgactatctaactcgtaaaaaaacctataatgatcatatagttaatctattattttgtgcaaatagatgggagtttgcatcttttatacaagaacaactagaacagggaattactttaatagttgatagatacgcattttctggagtagcgtatgccgccgctaaaggcgcgtcaatgactctcagtaagagttatgaatctggattgcctaaacccgacttagttatattcttggaatctggtagcaaagaaattaatagaaacgtcggcgaggaaatttatgaagatgttacattccaacaaaaggtattacaagaatataaaaaaatgattgaagaaggagatattcattggcaaattatttcttctgaattcgaggaagatgtaaagaaggagttgattaagaatatagttatagaggctatacacacggttactggaccagtggggcaactgtggatgtaatagtgaaattacattttttataaatagatgttagtacagtgttataaatggatgaagcatattactctggcaacttggaatcagtactcggatacgtgtccgatatgcataccgaactcgcatcaatatctcaattagttattgccaagatagaaactatagataatgatatattaaacaaggacattgtaaattttatcatgtgtagatcaaacttggataatccatttatctctttcctagatactgtatatactattatagatcaagagatctatcagaccgaattgattaattcattagacgacaatgaaattatcgattgtatagttaacaagtttatgagcttttataaggataacctagaaaatatagtagatgctatcattactctaaaatatataatgaataatccagattttaaaactacgtatgccgaagtactcggttccagaatagccgatatagatattaaacaagtgatacgtaagaatatactacaattgtctaatgatatccgcgaacgatatttgtgaaaaatattaaaaaaaaatactttttttattaaatgacgtcgcttcgcgaatttagaaaattatgctgtgatatatatcacgcatcaggatataaagaaaaatctaaattaattagagactttataacagatagggatgataaatatttgatcattaagctattgcttcccggattagacgatagaatttataacatgaacgataaacaaattataaaattatatagtataatatttaaacaatctcaggaagatatgctacaagatttaggatacggatatataggagacactattaggactttcttcaaagagaacacagaaatccgtccacgagataaaagcattttaactttagaagaagtggatagttttttaactacgttatcatccgtaactaaagaatcgcatcaaataaaattattgactgatgtagcatctgtttgtacatgtaatgatttaaaatgtgtagtcatgcttattgataaagatctaaaaattaaagcgggccctcggtacgtacttaacgctattagtcctcatgcctatgatgtgtttagaaaatctaataacttgaaagagataatagaaaatgcatctaaacaaaatctagactctatatctatttctgttatgactccaattaatcccatgttagcggaatcgtgtgattctgtcaataaggcgtttaaaaaatttccatcaggaatgtttgcggaagtcaaatacgatggtgaaagagtacaagttcataaaaataataacgagtttgccttctttagtagaaacatgaaaccagtactctctcataaagtggattatctcaaagaatacataccgaaagcatttaaaaaagctacgtctatcgtattggattctgaaattgttcttgtagacgaacataatgtaccgctaccgtttggaagtttaggaatacacaaaaagaaagaatataaaaactctaacatgtgtttgttcgtgtttgactgtttgtactttgatggattcgatatgacggacattccattgtacgaacgaagatcttttctcaaagatgttatggttgaaatacccaatagaatagtattctcagagttgacgaatattagtaacgagtctcagttaactgacgtattggatgatgcactaacgagaaaattagaaggattggtcttaaaagatattaatggagtatacgaaccgggaaagagaagatggttaaaaataaagcgagactatttgaacgagggttccatggcagattctgccgatttagtagtactaggtgcctactatggtaaaggagcaaagggtggtatcatggcagtctttctaatgggttgttacgacgatgaatccggtaaatggaagacggttaccaagtgttcaggacacgatgataatacgttaagggagttgcaagaccaattaaagatgattaaaattaacaaggatcccaaaaaaattccagagtggttagtagttaataaaatctatattcccgattttgtagtagaggatccgaaacaatctcagatatgggaaatttcaggagcagagtttacatcttccaagtcccataccgcaaatggaatatccattagatttcctagatttactaggataagagaggataaaacgtggaaagaatctactcatctaaacgatttagtaaacttgactaaatcttaatagttacatacaaactgaaaattaaaataacaccatttagttggtggtcgccatggatggtgttattgtatactgtctaaacgcgttagtaaaacatggcgaggaaataaatcatataaaaaatgatttcatgattaaaccatgttgtgaaagagtttgtgaaaaagtcaagaacgttcacattggcggacaatctaaaaacaatacagtgattgcagatttgccatatatggataatgcggtatccgatgtatgcaattcactgtataaaaagaatgtatcaagaatatccagatttgctaatttgataaagatagatgacgatgacaagactcctactggtgtatataattattttaaacctaaagatgttattcctgttatcatatctataggaaaggataaagatgtctgtgaactattaatctcatcagacatatcgtgtgcatgcgtggagttaaattcatatcacgtagccattcttcccatgaatgtttccttttttaccaaaggaaatgcctcgttgattattctcctgtttgatttctctatcgatgcagcacctctcttaagaagtgtaaccgataataatgttattatatctagacaccagcgtctacatgacgagcttccgagttccaattggttcaagttttacataagtataaagtccgactattgttctatattatatatggttgttgatggatctgtgatgcatgcgatagctgataatagaactcacgcaattattagcaaaaatatattagacaatactacaattaacgatgagtgtagatgctgttattttgaaccacagattaggattcttgatagagatgagatgctcaatggatcatcgtgtgatatgaacagacattgtattatgatgaatttacctgatgtaggcgaatttggatctagtatgttggggaaatatgaacctgacatgattaagattgctctttcggtggctggtaatttaataagaaatcgagactacattcccgggagacgaggctatagctactacgtttacggtatagcctctagataatttttttaagcacgaaataaaaaacataattttaaaccaatctatttcatactattttgtgtgatcaccatggacataaagatagatattagtatttctggtgataaatttacggtgactactaggagggaaaatgaagaaagaaaaaaatatctacctctccaaaaagaaaaaactactgatgttatcaaacctgattatcttgagtacgatgacttgttagatagagatgagatgtttactattctagaggaatattttatgtacagaggtctattaggcctcagaataaaatatggacgactctttaacgaaattaaaaaattcgacaatgatgcggaagaacaattcggtactatagaagaactcaagcagaaacttagattaaattctgaagagggagcagataactttatagattatataaaggtacaaaaacaggatatcgtcaaacttactgtatacgattgcatatctatgataggattgtgtgcatgcgtggtagatgtttggagaaatgagaaactgttttctagatggaaatattgtttacgagcgattaaactgtttattaatgatcacatgcttgataagataaaatctatactgcagaatagactagtatatgtggaaatgtcatagaaagttaatgagagcaaaaatatataaggttgtattccatatttgttattttttctgtaatagttaaaaaaatacattcgatggtctatctatcagattattatgtgttataaggtactttttctcataataaactagagtatgagtaagatagtgtttttcaaaacatataaatctaaaattgatggatgagatatacagctattaatttcgaaaatatataaatctaaaattgatggataagatatacagctattaatttcgaaaatatattttaatctgataactttaaacatggatttttgatggtggtttaacgttttaaaaaaagattttgttattgtagtatatgataatattaaaagatggatataaagaatttgctgactgcatgtactattttttacattactacattggctacggcagatatacctactccgccaccaacgggtcatgtgacaagggagaatatcttgataagaggcataatcaatgttgtaatcggtgtccacctggagaatttgccaaggttagatgtaatggtaacgataacacaaaatgtgaacgctgcccacctcatacatataccacaatccccaattattctaatggatgtcatcaatgtagaaaatgcccaaccggatcatttgataaggtaaagtgtaccggaacacagaacagtaaatgttcgtgtcttcctggttggtattgcgctactgattcttcacagactgaagattgttgaaattgtgtaccaaaaaggagatgtccatgcggatactttggtggaatagatgaacaaggaaatcctatttgtaaatcgtgctgtattggtgaatattgcaactacctacgtaattatagacttgatccattttctccatgcaaactatctaaatgtaattaattatgattttgatgataatgttaccatacattatatcgctacttggttagtgtattattcagtatgaagacctattaataattacttatcttttgacgatcttgttataattataatataaaaacttatggcatagtaactcataattgctgacgcgataaattcgtaataatctgttttgttcaaatttttataaggaatctacaggcataaaaataaaaatataatttataatatactcttacagcgcgccatcatgaatagcagcagtaaattaattgctgttattaatggatttagaaatagtggacgattttgtgatattaatatagttattaatgatgaaaggataaacgctcacagactcatcctatctggagcctccgaatatttttccattctgttttccaataattttatcgattctaatgaatacgaagttaatctaagtcatttagattatcaaagtgttaacgatttgatcgattacatttatgggatacctttgagcctaactaacgataacgtgaaatatattctttcaaccgctgattttttacaaattggatctgccattactgagtgcgaaaaatacatacttaaaaatctttgttctagaaactgtatcgatttctacatatacgctgataaatataataacaagaaaatagaatcagcgtcgtttaacacaatattacgaaatattttgagactcatcaacgatgaaaactttaaatacttaacagaggaatcaatgataaaaattttaagcgatgatatgttaaatataaaaaatgaggattttgcaccactaattctcattaaatggttagagagtactcaacaatcatgcaccgtcgagttacttagatgcctcagaatatcattgctttccccacaagttataaaatcactttatagtcatcaactggttagttcaatctacgaatgtataacattcttaaacaatatagcattcttggatgaatcatttcctagataccatagcatcgagttgatatctatcggtataagtaattcgcatgataagatttccataaactgctacaatcataaaaaaaatacatgggaaatgatatcttcacgtagatataggtgtagtttcgcagtggccgtcctggataatattatctatatgatgggtggatatgatcagtccccgtatagaagttcaaaggttatagcgtacaatacatgtacaaattcttggatatatgatataccagagctaaaatatcctcgttctaattgtgggggactggctgatgacgaatacatttattgtataggcggcatacgcgatcaggattcatcgttgacatctagtattgatagatggaagccatcaaaaccatattggcagaagtatgctaaaatgcgcgaaccaaaatgtgatatgggggttgcgatgttaaacggattaatatatgtcatgggtggaatcgttaaaggtgacacgtgtaccgacgcactagagagtttatcagaagatggatggatgaagcatcaacgtcttccaataaaaatgtccaatatgtcgacgattgttcatgatggcaagatttatatatctggaggttacaacaatagtagtgtagttaatgtaatatcgaatctagtccttagctataatccgatatatgatgaatggaccaaattatcatcattaaacattcctagaattaatcccgctctatggtcagcgcataataaattatatgtaggaggaggaatatctgatgatgttcgaactaatacatctgaaacatacgataaagaaaaagattgttggacattggataatggtcacgtgttaccacgcaattatataatgtataaatgcgaaccgattaaacataaatatccattggaaaaaacacagtacacgaatgattttctaaagtatttggaaagttttataggtagttgatagaacaaaatacataattttgtaaaaataaatcactttttatactaatatgacacgattaccaatacttttgttactaatatcattagtatacgctacaccttttcctcagacatctaaaaaaataggtgatgatgcaactctatcatgtaatcgaaataatacaaatgactacgttgttatgagtgcttggtataaggagcccaattccattattcttttagctgctaaaagcgacgtcttgtattttgataattataccaaggataaaatatcttacgactctccatacgatgatctagttacaactatcacaattaaatcattgactgctagagatgccggtacttatgtatgtgcattctttatgacatcaactacaaatgacactgataaagtagattatgaagaatactccacagagttgattgtaaatacagatagtgaatcgactatagacataatactatctggatctacacattcaccagaaactagttctgagaaaccagaggatatagataattttaattgctcgtcggtattcgaaatcgcgactccggaaccaattactgataatgtagaagatcatacagacaccgtcacatacactagtgatagcattaatacagtaagtgcatcatctggagaatccacaacagacgagactccggaaccaattactgataaagaagaagatcatacagtcacagacactgtctcatacactacagtaagtacatcatctggaattgtcactactaaatcaaccaccgatgatgcggatctttatgatacgtacaatgataatgatacagtaccaccaactactgtaggcggtagtacaacctctattagcaattataaaaccaaggactttgtagaaatatttggtattaccgcattaattatattgtcggccgtggcaatattctgtattacatattatatatataataaacgttcacgtaaatacaaaacagagaacaaagtctagatttttgacttacataaatgtctgggatagtaaaatctatcatattgagcggaccatctggttcaggaaagacagccatagccaaaagactatgggaatatatttggatttgtggtgtcccataccactagatttcctcgtcctatggaacgagaaggtgtcgattaccattacgttaacagagaggccatctggaagggaatagccgccggaaactttctagaacatactgagtttttaggaaatatttacggaacttctaaaactgctgtgaatacagcggctattaataatcgtatttgtgtgatggatctaaacatcgatggcgttagaagtcttaaaaatacgtacctaatgccttactcggtgtatataagacctacctctcttaaaatggttgagaccaagcttcgttgtagaaacactgaagcggatgatgagattcatcgtcgtgtgatgttggcaaaaactgacatggatgaggcaggtgaagccggtctattcgacactattatcattgaagatgatgtgaatttagcatatagtaagttaattcagatactacaggaccgtattagaatgtattttaacactaattagagacttaagacttaaaacttgataattaataatataactcgtttttatatgtggctatttcaacgtctaatgtattagttaaatattaaaacttaccacgtaaaacttaaaatttaaaatgatatttcattgacagatagatcacacattatgaactttcaaggacttgtgttaactgacaattgcaaaaatcaatgggtcgttggaccattaataggaaaaggtggattcggtagtatttatactactaatgacaataattatgtagtaaaaatagagcccaaagctaacggatcattatttaccgaacaggcattttatactagagtacttaaaccatccgttatcgaagaatggaaaaaatctcacaatataaagcacgtaggtcttatcacgtgcaaggcatttggtctatacaaatccattaatgtggaatatcgattcttggtaattaatagattaggtgcagatctagatgcggtgatcagagccaataataatagattaccaaaaaggtcggtgatgttgatcggaatcgaaatcttaaataccatacaatttatgcacgagcaaggatattctcacggagatattaaagcgagtaatatagtcttggatcaaatagataagaataaattatatctagtggattacggattggtttctaaattcatgtctaatggcgaacatgttccatttataagaaatccaaataaaatggataacggtactctagaatttacacctatagattcgcataaaggatacgttgtatctagacgtggagatctagaaacacttggatattgtatgattagatggttgggaggtatcttgccatggactaagatatctgaaacaaagaattgtgcattagtaagtgccacaaaacagaaatatgttaacaatactgcgactttgttaatgaccagtttgcaatatgcacctagagaattgctgcaatatattaccatggtaaactctttgacatattttgaggaacccaattacgacgagtttcggcacatattaatgcagggtgtatattattaagtgtggtgtttggtcgatgtaaaatttttgtcgataaaaattaaaaaataacttaatttattattgatctcgtgtgtacaaccgaaatcatggcgatgttttacgcacacgctctcggtgggtacgacgagaatcttcatgcctttcctggtacctgcagcggccgctcgagagctcctggtaaaagttaaacttggggagaatgatacagaaaatctttcttctactatatcggcggcaccatcgaggtaaccacctctcaagaagaccgcgtgaataatgtactcatgaaacgtttggaaactatacgccatatgtggtctgttgtatatgatcattttgatattgtgaatggtaaagaatgctgttatgtgcatacgcattcatctaatcaaaatcctataccgagtactgtaaaaacaaatttgtacatgaagactatgggatcatgcattcaaatggattccatggaagctctagagtatcttagcgaactgaaggaatcaggtggatggagtcccagaccagaaatgcaggaatttgaatatccagatggagtggaagacactgaatcaattgagagattggtagaggagttcttcaatagatcagaacttcaggctggtaaattagtcaaatttggtaattctattaattgttaaacatacatctgtttcagctaagcaactaagaacacgtatacggcagcagcttccttttatactctcatcttttaccaacacaaagggtggatatttgttcattggagttgataataatacacacaaagtatttggattcacggtgggttacgactacctcagactgatagagaatgatatagaaaagcatatcaaaagactttgtgttgtgcatttctgtgagaagaaagaggacatcaagtacacgtgtcgattcatcaaggtatataaacctggggatgaggctacctcgacatacgtgtgcgctatcaaagtggaaagatgctgttgtgctgtgtttgcagattggccagaatcatggtatatggatactaatggtatcaagaagtattctccagatgaatgggtgtcacatataaaattttaattaatgtaactatagagaacaaataataggttgtaatatcatatagacaataactaacaattaattagtaactgttatctcttttttaactaaccaactaactatatacctattaatacatcgtaattatagttcttaacatctattaatcattgattcgcttctttaattttttataaactaacattgttaattgaaaagggataacatgttacagaatataaattatatatggatttttttaaaaaggaaatacttgactggagtgtatatttatctcttcattatatagcacgcgtgtgttccaattcttccacatcccatataatacaggattataatctcgttcgaacatacgagaaagtggataaaacaatagttgattttttatctaggttgccaaatttattccatattttagaatatggggaaaatattctacatatttattctatggatgatgctaatacgaatattataattttttttctagatagagtattaaatattaataagaacgggtcatttatacacaatctcaggttatcatcatccattaatataaaagaatatgtatatcaattagttaataatgatcatccagataataggataagactaatgcttgaaaatggacgtagaacaagacattttttgtcctatatatcagatacagttaatatctatatatgtattttaataaatcatggattttatatagatgcagaagacagttacggttgtacattattacatagatgtatatatcactataagaaatcagaatcagaatcatacaatgaattaattaagatattgttaaataatggatccgatgtagataaaaaagatacgtacggaaacacaccttttatcctattatgtaaacacgatatcaacaacgtggaattgtttgagatatgtttagagaatgctaatatagactctgtagactttaatagatatacacctcttcattatgtctcatgtcgtaataaatatgattttgtaaagttattaatttctaaaggagcaaatgttaatgcgcgtaataaattcggaactactccattttattgtggaattatacacggtatctcgcttataaaactatatttggaatcagacacagagttagaaatagataatgaacatatagttcgtcatttaataatttttgatgctgttgaatctttagattatctattatccagaggagttattgatattaactatcgtactatatacaacgaaacatctatttacgacgctgtcagttataatgcgtataatacgttggtctatctattaaacagaaatggtgattttgagacgattactactagtggatgtacatgtatttcggaagcagtcgcaaacaacaacaaaataataatggaagtactattgtctaaacgaccatctttgaaaattatgatacagtctatgatagcaattactaaaaataaacaacataatgcagatttattgaaaatgtgtataaaatatactgcgtgtatgaccgattatgatactcttatagatgtacagtcgctacagcaatataaatggtatattttaaaatgtttcgatgaaatagatatcatgaagagatgttatataaaaaataaaactgtattccaattagttttttgtatcaaagacattaatactttaatgagatatggtaaacatccttctttcgtgaagtgcactagtctcgacgtatacggaagtcgtgtacgtaatatcatagcatctattagatatcgtcagagattaattagtctattatccaagaagctggatgcgggagataaatggtcgtgttttcctaacgaaataaaatataaaatattggaaaactttaacgataacgaactatccacatatctaaaaatcttataaacactattaaaatataaaatctaagtaggataaaatcacactacatcattgtttccttttagtgctcgacagtgtatactatttttaacactcataaataaaaatgaaaacgatttccgttgttacgttgttatgcgtactacctgctgttgtttattcaacatgtactgtacccactatgaataacgctaaattaacgtctaccgaaacatcgtttaatgataaacagaaagttacatttacatgtgatcagggatatcattctttggatccaaatgctgtctgcgaaacagataaatggaaatacgaaaatccatgcaagaaaatgtgcacagtttctgattatgtctctgaattatatgataagccattatacgaagtgaattccaccatgacactaagttgcaacggcgaaacaaaatattttcgttgcgaagaaaaaaatggaaatacttcttggaatgatactgttacgtgtcctaatgcggaatgtcaacctcttcaattagaacacggatcgtgtcaaccagttaaagaaaaatactcatttggggaatatatgactatcaactgtgatgttggatatgaggttattggtgcttcgtacataagttgtacagctaattcttggaatgttattccatcatgtcaacaaaaatgtgatataccgtctctatctaatggattaatttccggatctacattttctatcggtggcgttatacatcttagttgtaaaagtggttttatactaacgggatctccatcatccacatgtatcgacggtaaatggaatcccatactcccaacatgtgtacgatctaacgaaaaatttgatccagtggatgatggtcccgacgatgagacagatttgagcaaactctcgaaagacgttgtacaatatgaacaagaaatagaatcgttagaagcaacttatcatataatcatagtggcgttaacaattatgggcgtcatatttttaatctccgttatagtattagtttgttcctgtgacaaaaataatgaccaatataagttccataaattgctaccgtaaatataaatccgttaaaataattaataatttaataacaaacaagtatcaaaagattaaagacttatagctagaatcaattgagatgtcttcttcagtggatgttgatatctacgatgccgttagagcatttttactcaggcactattataacaagagatttattgtgtatggaagaagtaacgccatattacataatatatacaggctatttacaagatgcgccgttataccgttcgatgatatagtacgtactatgccaaatgaatcacgtgttaaacaatgggtgatggatacacttaatggtataatgatgaatgaacgcgatgtttctgtaagcgttggcaccggaatactattcatggaaatgtttttcgattacaataaaaatagtatcaacaatcaactaatgtatgatataattaatagcgtatctataattctagctaatgagagatatagaagcgcttttaacgacgatggtatatacatccgtagaaatatgattaacaagttgtacggatacgcatctctaactactattggcacgatcgctggaggtgtttgttattatctgttgatgcatctagttagtttgtataaataattatttcaatatactagttaaaattttaagattttaaatgtataaaaaactaataacgtttttatttgtaataggtgcattagcatcctattcgaataatgagtacactccgtttaataaactgagtgtaaaactctatatagatggagtagataatatagaaaattcatatactgatgataataatgaattggtgttaaattttaaagagtacacaatttctattattacagagtcatgcgacgtcggatttgattccatagatatagatgttataaacgactataaaattattgatatgtataccattgactcgtctactattcaacgcagaggtcacacgtgtagaatatctaccaaattatcatgccattatgataagtacccttatattcacaaatatgatggtgatgagcaacaatattctattactgcagagggaaaatgctataaaggaataaaatatgaaataagtatgatcaacgatgatactctattgagaaaacatactcttaaaattggatctacttatatatttgatcgtcatggacatagtaatacatattattcaaaatatgatttttaaaaatttaaaatatattatcacttcagtgacagtagtcaaataacaaacaacaccatgagatatattataattctcgcagttttgttcattaatagtatacacgctaaaataactagttataagtttgaatccgtcaattttgattccaaaattgaatggactggggatggtctatacaatatatcccttaaaaattatggcatcaagacgtggcaaacaatgtatacaaatgtaccagaaggaacatacgacatatccgcatttccaaagaatgatttcgtatctttctgggttaaatttgaacaaggcgattataaagtggaagagtattgtacgggactatgcgtcgaagtaaaaattggaccaccgactgtaacattgactgaatacgacgaccatatcaatttgtacatcgagcatccgtatgctactagaggtagcaaaaagattcctatttacaaacgcggtgacatgtgtgatatctacttgttgtatacggctaacttcacattcggagattctaaagaaccagtaccatatgatatcgatgactacgattgcacgtctacaggttgcagcatagactttgtcacaacagaaaaagtgtgcgtgacagcacagggagccacagaagggtttctcgaaaaaattactccatggagttcgaaagtatgtctgacacctaaaaagagtgtatatacatgcgcaattagatccaaagaagatgttcccaatttcaaggacaaaatggccagagttatcaagagaaaatttaataaacagtctcaatcttatttaactaaatttctcggtagcacatcaaatgatgttaccacttttcttagcatgcttaacttgactaaatattcataactaatttttattaatgatacaaaaacgaaataaaactgcatattatacactggttaacgcccttataggctctaaccattttcaagatgaggtccctgattatagtccttctgttcccctctatcatctactccatgtctattagacgatgtgagaagactgaagaggaaacatggggattgaaaatagggttgtgtataattgccaaagatttctatcccgaaagaactgattgcagtgttcatctcccaactgcaagtgaaggattgataactgaaggcaatggattcagggatatacgaaacaccgataaattataaaaaaagcaatgtgtccgctgtttccgttaataatactattttcgtaactggcggattattcataaataactctaatagcacgatcgtggttaacaatatggaaaaacttgacatttataaagacaaacaatggtcgattatagaaatgcctatggctagggtatatcacggcatcgactcgacatttggaatgttatattttgccggaggtctatccgttaccgaacaatatggtaatttagagaaaaacaacgagatatcttgttacaatcctagaacgaataagtggtttgatatttcatatactatttataagatatccatatcatcattgtgtaaactaaataacgtcttctatgtatttagtaaggacattggatatgtggaaaagtatgatggtgcatggaagttagtacatgatcgtctccccgctataaaggcattatcaacttctccttattgattgaaaatgaaaatataaatagtttttatgtatagcagtattaccctatagttttattgcttactactaacatggatacagatgttacaaatgtagaagatatcataaatgaaatagatagagagaaagaagaaatactaaaaaatgtagaaattgaaaataataaaaacattaacaagaatcatccaagtggatatattagagaagcactcgttattaatacaagtagtaatagtgattccattgataaagaagttatagaatgtatcagtcacgatgtaggaatatagatcatatctactaatttttataatcgatacaaaacataaaaaacaactcgttattacatagcaggcatggaatccttcaagtattgttttgataacgatggcaagaaatggattatcggaaatactttatattctggtaattcaatactatataaggtcagaaaaaatttcactagttcgttctacaattacgtaatgaaaatagatcacaaatcacacaagccattgttgtctgaaatacgattctatatatctgtattggatcctttgactatcgacaactggacacgggaacgtggtataaagtatttggctattccagatctgtatggaattggagaaaccgatgattatatgttcttcgttataaagaattcgggaagagtattcgccccaaaggatactgaatcagtcttcgaagcatgcgtcactatgataaacacgttagagtttatacactctcgaggatttacccatggaaaaatagaaccgaggaatatactgattagaaataaacgtctttcactaattgactattctagaactaacaaactatacaagagtggaaactcacatatagattacaacgaggacatgataacttcaggaaatatcaattatatgtgtgtagacaatcatcttggagcaacagtttcaaaacgaggagatttagaaatgttgggatattgcatgatagaatggttcggtggcaaacttccatggaaaaacgaaagtagtataaaagtaataaaacaaaaaaaagaatataaaaaatttatagctactttctttgaggactgttttcctgaaggaaatgaacctctggaattagttagatatatagaattagtatacacgttagattattctcaaactcctaattatgacagactacgtaaactgtttatacaagattgaaattatattctttttttatagagtgtggtagtgttacggatatctaatattaatattagactatctctatcgcgctacacgaccaatatcgattactatggatatcttcagggaaatcgcatcttctatgaaaggagagaatgtattcatttctccagcgtcaatctcgtcagtattgacaatactgtattatggagctaatggatccactgctgaacagctatcaaaatatgtagaaacggaggagaacacggataaggttagcgctcagaatatctcattcaaatccatgaataaagtatatgggcgatattctgccgtgtttaaagattcctttttgagaaaaattggcgataagtttcaaactgttgacttcactgattgtcgcactatagatgcaatcaacaagtgtgtagatatctttactgaggggaaaatcaatccactattggatgaaccattgtctcctgatacctgtctcctagcaattagtgccgtatactttaaagcaaaatggttgatgccattcgaaaaggaatttaccagtgattatcccttttacgtatctccgacggaaatggtagatgtaagtatgatgtctatgtacggcaaggcatttaatcacgcatctgtaaaggaatcattcggcaacttttcaatcatagaactgccatatgttggagatactagtatgatggtcattcttccagacaagattgatggattagaatccatagaacaaaatctaacagatacaaattttaagaaatggtgtaactctctggaagctacgtttatcgatgttcacattcccaagtttaaggtaacaggttcgtataatcttgtggatactctagtaaagtcaggactgacagaggtgttcggttcaactggagattatagcaatatgtgtaattcagatgtgagtgtcgacgctatgattcacaaaacgtatatagatgtcaatgaagagtatacagaagcagctgcagcaacttgtgcactggtgtcagactgtgcatcaacaattacaaatgagttctgtgtagatcatccgttcatctatgtgattaggcatgttgatggaaaaattcttttcgttggtagatattgctctccgacaactaattgttaaccattttttttaaaaaaatagaaaaaacatgtggtattagtgcaggtcgttgttcttccaattgcaattggtaagatgacggccaactttagtacccacgtcttttcaccacagcactgtggatgtgacagactgaccagtattgatgacgtcagacaatgtttgactgaatatatttattggtcgtcctatgcataccgcaacaggcaatgcgctggacagttgtattccacactcctctcttttagagatgatgcggaatcagtgttcatcgacattcgcgagctggtaaaaaatatgccgtgggatgatgtcaaagattgtacagaaatcatccgttgttatataccggatgagcaaaaaaccatcagagagatttcggccatcatcggactttgtgcatatgctgctacttactggggaggtgaagaccatcccactagtaacagtctgaacgcattgtttgtgatgcttgagatgctcaattacgtggattataacatcatattccggcgtatgaattgatgagttgtacatcttgacattttctttcttctcttctccctttcttctcttctcccttcctccctcttctccctttcccagaaacaaacttttttacccactataaaataaaatgagtatactacctattatatttcttcctatatttttttattcttcattcgttcagacttttaacgcgcctgaatgtatcgacaaagggcaatattttgcatcattcatggagttagaaaacgagccagtaatcttaccatgtcctcaaataaatacgctatcatccggatataatatattagatattttatgggaaaaacgaggagcggataatgatagaattataccgatagataatggtagcaatatgctaattctgaacccgacacaatcagactctggtatttatatatgcattaccacgaacgaaacctactgtgacatgatgtcgttaaatttgacaatcgtgtctgtctcagaatcaaatatagatcttatctcgtatccacaaatagtaaatgagagatctactggcgaaatggtatgtcccaatattaatgcatttattgctagtaacgtaaacgcagatattatatggagcggacatcgacgccttagaaataagagacttaaacaacggacacctggaattattaccatagaagatgttagaaaaaatgatgctggttattatacatgtgttttagaatatatatacagaggtaaaacatataacgtaaccagaattgtaaaattagaggtacgggataaaataataccttctactatgcaattaccagatggcattgtaacttcaataggtagtaatttgactattgcgtgtagagtatcgttgagacctcccacaacggatgcagacgtcttttggataagtaatggtatgtattacgaagaagatgatggggacggagacggtagaataagtgtagcaaataaaatctatatgaccgataagagacgtgttattacatcccggttaaacattaatcctgtcaaggaagaagatgctacaacgtttacgtgtatggcgtttactattcctagcatcagcaaaacagttactgttagtataacgtgaatgtatgttgttacatttccatgtcaattgagtttataagaatttttatacattatcttccaacaaacaattgacgaacgtattgctatgattaactcccacgatactatgcatattattaatcattaacttgcagactatacctagtgctattttgacatactcatgttcttgtgtaattgcggtatctatattattaaagtacgtaaatctagctatagttttattatttaattttagataatataccgtctccttatttttaaaaattgccacatcctttattaaatcatgaatgggaatttctatgtcatcgttagtatattgtgaacaacaagagcagatatctataggaaagggtggaatgcgatacattgatctatgtagttttaaaacacacgcgaactttgaagaatttatataaatcattccatcgatacatccttctatgttgacatgtatatatccaggaattcttttattaatgtcaggaaatgtataaactaaaacattgcccgaaagcggtgcctctatctgcgttatatccgttcttaacttacaaaatgtaaccaatacctttgcatgacttgttttgttcggcaacgttagtttaaacttgacgaatggattaattacaatagcatgatccgcgcatctattaagtttttttactttaacgcccttgtatgtttttacagagactttatctaaatttctagtacttgtatgtgttataaatataacgggatatagaactgaatcacctaccttagatacccaattacattttatcagatccagataataaacaaattttgtcgccctaactaattctatattgttatatattttacaattggttatgatatcatgtaataacttggagtctaacgcgcatcgtcgtacgtttatacaattgtgatttagtgtagtatatctacacatgtatttttccgcactatagtattctggactagtgataaaactatcgttatatctgtcttcaatgaactcatcgagatattgctctctgtcatattcatacacctgcataaactttctagacatcttacaatccgtgttattttaggatcatatttacatatttacgggtatatcaaagatgttagattagttaatgggaatcgtctataataatgaatattaaacaattatatgaggacttttaccacaaagcatcataaaaatgagtcgtcgtctgatttatgttttaaatatcaaccgcaaatcaactcataaaatacaagagaatgaaatatatacatattttagtcattgcaatatagaccatacttctacagaacttgattttgtagttaaaaactatgatctaaacagacgacaacatgtaactgggtatactgcactacactgctatttgtataataattactttacaaacgatgtactgaagatattattaaatcatgacgtaaatgtaacgatgaaaaccagtagcggacgtatgcctgtttatatattgcttactagatgttgcaatatttcacatgatgtagtgatagatatgatagacaaagataaaaaccacttattacatagagactattccaacctattactagagtatataaaatctcgttacatgttattaaaggaagaggatatcgatgagaacatagtatccactttattagataagggaatcgatcctaactttaaacaagacggatatacagcgttacattattattatttgtgtctcgcacacgtttataaaccaggtgagtgtagaaaaccgataacgataaaaaaggccaagcgaattatttctttgtttatacaacatggagctaatctaaacgcgttagataattgtggtaatacaccattccatttgtatcttagtattgaaatgtgtaataatattcatatgactaaaatgctgttgacttttaatccgaatttcaaaatatgtaataatcatggattaacgcctatactatgttatataacttccgactacatacaacacgatattcttgttatgttaatacatcactatgaaacaaatgttggagaaatgccgatagatgagcgtcgtatgatcgtattcgagtttatcaaaacatattctacacgtccggcagattcgataacttatttgatgaataggtttaaaaatataaatatttatacccgctatgaaggaaagacattattacacgtagcatgtgaatataataatacacacgtaatagattatcttatacgtatcaacggagatataaatgcgttaaccgacaataacaaacacgctacacaactcattatagataacaaagaaaattccccgtataccatcgattgtttactgtatatacttagatatattgtagataagaatgtgataagatcgttggtggatcaacttccatctctacctatcttcgatataaaatcatttgagaaattcatatcctactgtatacttttagatgacacattttacgataggcacgttaagaatcgcgattctaaaacgtatcgatacgcattttcaaaatacatgtcgtttgataaatacgatggtataataactaaatgtcacgacgaaacaatgttactcaaactgtccactgttctagacactacactatatgcagttttaagatgccataattcgaaaaagttaagaagatacctcaacgagttaaaaaaatataataacgataagtcctttaaaatatattctaatattatgaatgagagataccttaatgtatattataaagatatgtacgtgtcaaaggtatatgataaactatttcctgttttcacagataaaaattgtctactaacattactaccttcagaaattatatacgaaatattatacatgctgacaattaacgatctttataatatatcgtatccacctaccaaagtatagttgtatttttctcatgcgatgtgtgtaaaaaaactgatattatataaatattttagtgccgtataataaagatgacgatgaaaatgatggtacatatatatttcgtatcattattgttattgctattccacagttacgccatagacatcgaaaatgaaatcacagaattcttcaataaaatgagagatactctaccagctaaagactctaaatggttgaatccagcatgtatgttcggaggcacaatgaatgatatagccgctctaggagagccattcagcgcaaagtgtcctcctattgaagacagtcttttatcgcacagatataaagactatgtggttaaatgggagaggctagaaaagaatagacggcgacaggtttctaataaacgtgttaaacatggtgatttatggatagccaactatacatctaaattcagtaaccgtaggtatttgtgtaccgtaactacaaagaatggtgactgtgttcagggtatagttagatctcatattaaaaaacctccttcatgcattccaaaaacatatgaactaggtactcatgataagtatggcatagacttatactgtggaattctttacgcaaaacattataataatataacttggtataaagataataaggaaattaatatcgacgacattaagtattcacaaacgggaaagaaattaattattcataatccagagttagaagatagtggaagatacaactgttacgttcattacgacgacgttagaatcaagaatgatatcgtagtatcaagatgtaaaatacttacggttataccgtcgcaagaccacaggtttaaactaatactagatccaaaaatcaacgtaacgataggagaacctgccaatataacatgcactgctgtgtcaacgtcattattgattgacgatgtactgattgaatgggaaaatccatccggatggcttataggattcgattttgatgtatactctgttttaactagtagaggcggtattaccgaggcgaccttgtactttgaaaatgttactgaagaatatataggtaatacatataaatgtcgtggacacaactattattttgaaaaaacccttacaactacagtagtattggagtaaatacacaatgcatttttatatacattactgaataattattattattatttatatcgtatttgtgctataacgcgactatctaggtatttgtatctcactgatagagaacatataaatatagactctattaaacagttgtgtaaaatatcaaatcctaatagatgtggatgtacggctttacatgagtacttttataattatagatcagtcaacggaaaatacaagtatagatacaacggttactatcaatattatttatctagcgattatgaaaattataatgaatattattatgatgattatgatagaactggtatgaacagtgagagtgataatatatcaatcaaaacagaatatgaattctatgatgaaacacaagatcaaagtacacaactagtaggttacgacattaaactcaaaaccaatgaggatgattttatggctatgatagatcagtgggtgtccatgattatatagatgaatcaattaataaagtagtatatggaagagagtctcacgtaagatggcgggatatatggcaagaacataatgatggcgtatacagtataggaaaggagtgcatagataatatatacgaagacaaccataccgtagacgaattctacaagatagacagcgtatcagatgtagatgacgcggaacacatatctccgataactaatgatgtatctacacaaacatgggaaaagaaatcagagttagatagatacatggaaatgtatcctcgtcatagatatagtaagcattctgtctttaagggattttctgacaaagttagaaaaaatgatttagacatgaatgtggtaaaagaattactttctaacggtgcatctctaacaattaaggatagcagtaataaggatccaataaccgtttattttcgaagaacgataatgaatttagaaatgattgatattattaacaaacatacaactattgatgaacgaaagtatatagtacactcctatctaaaaaattataaaaatttcgattatccatttttcaggaagttagttttgactaataaacattgtctcaacaattattataatataagcgacagcaaatatggaacaccgctacatatattggcgtctaataaaaaattaataactcctaattacatgaagttattagtgtataacggaaatgatataaacgcacgaggtgaagatacacaaatgcgaactccattacacaaatatttgtgtaaatttgtatatcataatattgaatatggtatccgatactataatgaaaagattatagacgcatttatagagttaggagccgatctaactattccaaataacgatggaatgataccagtagtttactgtatacactcaaatgcagaatatggttataacaatattactaacataaagataatacgtaaactacttaatcttagtagacgtgcgtcacataatctatttagagatcgagtcatgcacgattatataagtaatacatatattgatcttgagtgtttagatattattagatcgttggatggattcgatatcaatggttactttgaaggacgtacaccacttcattgcgctatacaacataacttcactcagattgctaagtacttattagatcgaggagctgatatagtcgtacccaacacattgattatacatcagtacatacagtaaatagcatagatatggaggaggatacaaatatttcaaataaagttataaggtacaacactgtcaataatatatggaagacattacctaacttctggactggaactataaatccaggcgtggtctcgcataaagatgatatatatgttgtatgcgacatcaaagatgaaaaaaatgttaagacttgtatatttagatataacacgaatacgtataacggatgggaattggttacgacgacagaaagcagattatcagctctgcatactattcttcatgacaataccataatgatgttacattgttatgaatcgtatatgttacaagatacatttaatgtgtacactcgcgaatggaatcatatgtgtcatcaacattcgaatagttatatcatgtacaatatactacccatctactaaatataatagaataaaataaatgagtatgatcattttagataacgattgattttatcattaccgcttcattcttatattctttgcttacggaacctatatttagaaacatctactaacgattttttatgcttgcattattaatggtatgtaatatgattgattgtgtacgcaataccaatttgttaagtatgaatacggggtacaaacataaactgaaatttaacattatttatttatgatatatatcgttatcgttattgtttggtctataccatggatatctttaaagaactaatcttaaaacaccctgatgaaaatgttttgatttctccagtttctattttatctactttatctattctaaatcatggagcagctggttctacagctgaacaactatcaaaatatatagagaatatgaatgagaatacacccgatgataagaaggatgacaataatgacatggacgtagatattccgtattgtgcgacactagctaccgcaaataaaatatacggtagcgatagtatcgagttccacgcctccttcctacaaaaaataaaagacgattttcaaactgtaaactttaataatgctaaccaaacaaaggaactaatcaacgaatgggttaagacgatgacaaatggtaaaattaattccttattgactagtccgctatccattaatactcgtatgacagttgttagcgccgtccattttaaagcaatgtggaaatatccattttctaaacatcttacatatacagacaagttttatatttctaagaatatagttaccagtgttgatatgatggtgggtaccgagaataacttgcaatatgtacatattaatgaattattcggaggattctctattatcgatattccatacgagggaaactctagtatggtaattatactaccggacgacatagaaggtatatataacatagaaaaaaatataacagatgaaaaatttaaaaaatggtgtggtatgttatctactaaaagtatagacttgtatatgccaaagtttaaagtggaaatgacagaaccgtataatctggtaccgattttagaaaatttaggacttactaatatattcggatattatgcagattttagcaagatgtgtaatgaaactatcactgtagaaaaatttctacatacgacgtttatagatgttaatgaggagtatacagaagcatcggccgttacaggagtatttatgactaacttttcgatggtatatcgtacgaaggtctacataaaccatccattcatgtacatgattaaagacaacacaggacgtatactttttatagggaaatactgctatccgcaataaatataaacaaatagacttttatcacgtttatctatgtctaaatattacaaatagtaatagtataaactaaagctgataatacttaaaaaaataataatatcatttacaattaatagtataaactaaaaattaaacaaatcgttattataagtaatatcaaaatgatgatatacggattaatagcgtgtcttatattcgtgacttcatccatcgctagtccactttatattcccgttattccacccattacggaagataaatcgttcaatagtgtagaggtattagtttccttgtttagagatgaccaaaaagactatacggtaacttctcagttcaataactacactatcgataccaaagactggactatcggcgtactatccacacctgatggtttggatataccattgactaatataacttattggtcacggtttactataggtcgtgcattgttcaaatcagagtctgaggatattttccaaaagaaaatgagtattctaggtgtttctatagaatgtaagaagtcgtcgacattacttacttttttgaccgtgcgtaaaatgactcgagtatttaataaatttccagatatggcttattatcgaggagactgtttaaaagccgtttatgtaacaatgacttataaaaatactaaaactggagagactgattacacgtacctctctaatggggggttgcctgcatactatcgtaatggggtcgatggttgattattgattagtatattccttattcacacaaaaagaacatttttataaacatgaaaccactgtctaaatgtaattatgatcttgatttatagatgaagatcagcctttagaggattttaaccagtatgtttaatatgaaaaaaataaacataacatattttgagattaagcgctattgtgcttaattattttgctctataaactgaatatatagccacaattattgacgggcttgtttatgaccggcaatcatgaatttacagaaattatctctggctatatatcttactgcgacatgttcgtggtgttatgaaacatgcataagaaaaactgcgttgtatcatgacattcaattggagcatgtagaagacaataaagatagtgtagcgtcgctaccgtacaagtagtcaatcaaagagaacgtagtagattgttggctacatttaattggacagatatagctgagggtgttagaaatgagttcattaaaatatgtgatatcaacggaacatatttatataattatactattgctgttagtataattattgattccacggaagaactaccaacagttactccaattacaacaacatatgaaccttctacatataattatactatcgatgatagcactgttattactactgaagaactacaagtgactcctcatatggatctccatcgatgatacatgtattaaaatactttccgaataagtcttttaaatattgtattaattatgaaaaactatgctatgcgagtatgatgcaaagatgtttaatgatacgatactagattttatctctagcgagagatgtcgttagaatcatttatcataactacgtttaataataattcatcaacgaatatcgataacatgtgtcatttatacgttaaagtctgtccgtcttctctattgtttagactgtttgtagaatgctgtgatataaacaaactagtagaaggtacgactccgttacactgttatctaatgaatgaaggatttgaatcatctgttttaaaaaacctattaaaggagtatgtcatgaatacgtttaatgttcatgacatccattacacaaatatttaactcatgatgaagttgagaatgatatgctttctgatagtatagatagctttagctaatataaaaatatattaatccactatatattctagacttgatttaaaaccgataaactactactacgtactgtataagttgttaaaaaaaggagcagaccctaattatgtagatgatagaggtaatacttttcttcattacttctgcatctatatgtccacttatgagaaaacgtcatttaataagatgcatcgtgaaaagaaatttattaaagagttggtaaaatatgaaaccgaaagtaaataatataggaaatacacctctacataactacgtatctcaatatgatatcactctcattcctcatccacaacccattaaaaaaatggaaattaaagccctctattagcataaacggctacaggtctacctttacaatggcctctccttgtgcccagttcagaccctgtcattgccacgctactaaggactccctgaataccgtggccgacgtcagacattgtctgactgaatacatcctgtgggtttctcatagatggacccatagagaaagcgcagggtctctctacaggcttctcatctctttcagaactgatgcaacggagctctttggtggtgagttgaaggattcacttccgtgggacaatatcgacaattgcgtggagatcattaaatgtttcatcagaaatgactccatgaaaaccgccgaagaacttcgtgcaatcattggactttgtactcaatcagctatcgtctctggaagagtcttcaacgataagtatatcgacatactacttatgctgcgaaagattctgaacgagaacgactatctcaccctcttggatcatatccgcactgctaaatactaaatctccttcatgctctctcactacactttttatcatcttatgaggaatgattgccttcatcatttttcgtgaaataggaataattagcaccagaatagctatggattgcacatgtattctatgtcgtctactggatgaagatgtgacgtacaaaaaaataaaactagaaattgaaacgtgtcacaacttatcaaaacatatagatagacgaggaaacaatgcgctacattgttacgtcttcaataaatgcgatacagacattaagattgttcgactgttactctctcgcggagtcgagagactttgtagaaacaacgaaggattaactccgctaggagcatacagtaagcatagatacgtaaaatctcaaattgtgcatctactgatatccagctattcgaattcctctaacgaactcaagtcgaatataaatgatttcgatctgtattcgtatatgtcttcggataatatcgacttacgtctgctaaaatacctaattgtggataaacggatacgtccgtccaagaatacgaattatgcaatcaatggtctcggattggtggatatatacgtaacgacgcctaatccgagaccagaagtattgctatggcttcttaaatcagaatgttacagcaccggttacgtatttcgtacctgtatgtacgacagtgatatgtgtaagaactctcttcattactatatatcgtctcatagagaatctcaatctctatccaaggatgtaattaaatgtttgatcaataacaatgtttccatccatggcagagacgaaggaggatctttacccatccaatactactggtcttgctcaaccatagatatagagattgttaaattattaataaaggatgtggacacgtgtagagtatacgacgtcagccctatattagaggcggattatctaaacaagcgatttagagtaaccccatataatgtagacatggaaatcgttaatcttcttattgagagacgtcatactcttgtcgacgtaatgcgtagtattacttcttacgattccagagactataaccactacatcatcgataacattctaaagagatttagacaacaggatgaatccatcgtacaagccatgttgataaactacttacattacggcgatatggtcgttcgatgcatgttagataacggacaacaactatcctctgcacgactactttgttaataataatctcgtcgatgtaaacgtcgtaaggtttatcgtggaaaataatggacacatggctgtaaatcacgtatcgaacaatggccgtctatgtatgtacggtctgatattatcgagatttaataattgcgggtatcactgttatgaaaccatactaatagatgtatttgatatactaagcaagtacatggataatatagatatgatcgataatgagaataaaactctactatattacgcggtcgatgtcaataatatacaatttgcaaagcggttattggaatatggagcgagtgttacaacatcacgctcgataatcaatacggccatccagaaaagtagttacagaagagaaaacaaaacgaggatagttgatttattacttagctaccatcccactctagagactatgattgacgcatttaatagagatatacgctatctatatcctgaaccattattcgcctgtatcagatacgccttaatcctagatgatgattttccttctaaagtaagtatgatatctccggtcgtcataaggaactaaagcgctatagagtagacattaatagaatgaagaatgcctacatatcaggcgtctccatgtttgatatattatttaaacgaagcaaacgccacagattgagatacgcaaagaatccgacatcaaatggtacaaaaaagaactaacgtccatcattacagaaactgtaaagaacaatgagaggatcgactccatagtggacaacattaatacagacgataacttgatttcgaaattacccatggagatactttattactccattaaataatttatcatggagcgataatgtcctgtttcatttgtttccatgacatattacaaaatcgattccgtccaagatgataaaaacatttaccggcatcataaacacggagtttattttatatgtctcgcataaacattactaaaaaaatatattgttcggttttctttcacatctttaattatgaaaaagtaaatcattatgagatggacgagattgtacgcatcgttcgcgacagtatgtggtacatacctaacgtatttatggacgacggtaagaatgaaggtcacgtttctgtcaacaatgtttgtcatatgtattttacgttctttgatgtggatacatcgtctcatctgtttaagctagttattaaacactgcgatctgaataaacgaggtaactctccattacattgctatacgatgaatacacgatttaatccatctgtattaaagatattgttacaccacggcatgcgtaactttgatagcaaggatgaaaaaggacatattcctctacaccactatctgattcattcactatcaatcgataacaagatctttgatatactaacggacaccattgatgactttagtaaatcatccgatctattgctgtgttatcttagatataaattcaatgggagcttaaactattacgttctgtacaaaggatccgaccctaattgcgtcgacgaggatggactcacttctcttcattactactgtaaacacatatccacgttctacaaaagcaattattacaagttaagtcacactaagatgcgagccgagaagcgattcatctacgcgataatagattatggagcaaacattaacgcggttacacacttaccttcaacagtataccaaacatagtcctcgtgtggtgtatgctcttttatctcgaggagccgatacgaggatacgtaataatcttgattgtacacccatcatggaacgattgtgcaacaggtcatattctcataatgttactcaattggcacgaacaaaaggaagaaggacaacatctactttatctattcataaaacataatcaaggatacactctcaatatactacggtatctactagataggttcgacattcagaaagacgaatactataataccgcctttcaaaattgtaacaacaatgttgcctcatacatcggatacgacatcaaccttccgactaaagacggtattcgacttggtgtttgaaaacagaaacatcatatacaaggcggatgttgtgaatgacatcatccaccacagactgaaagtatctctacctatgattaaatcgttgttctacaagatgtcagaattctctccctacgacgattactacgtaaaaaagatactagcctactgcctattaagggacgagtcattcgcggaactacatagtaaattctgtttaaacgaggactataaaagtgtatttatgaaaaatatatcattcgataagatagattccatcatcgtgacataagtcgccttaaagagattcgaatctccgacaccgacctgtatacggtatcacagctatcttaaagccatacattcggacagacacatttcatttcccatgtacgacgatctcatagaacagtgccatctatcgatggagcataaaagtaaactcgtcgacaaagcactcaataaattagagtctaccatcggtcaatctagactatcgtatttgcctccggaaattatgcgcaatatcatctaaacagtatgttgtacggaaagaaccattacaaatattatccatgatagaaagaaaatatctatatgattggagaagtaggaaacaggaacaagacgacgattactacattattaaatcatgaagtccgtattatactcgtatatattgtttctctcatgtataataataaacggaagagatatagcaccgcatgcaccatccgatggaaagtgtaaagacaacgaatacaaacgccataatttgtgtccgggaacatacgcttccagattatgcgatagcaagactaacacacgatgtacaccctgtggttcgggtaccttcacatctcgcaataatcatttacccgcttgtctaagttgtaacggaagacgcgatcgtgtaacacgactcacaatagaatctgtgaatgctctcccggatattattgtcttctcaaaggatcatccggatgcaaggcatgtgtttcccaaacaaaatgtggaataggatacggagtatccggagacgtcatctgttctccgtgtggtctcggaacatattctcacaccgtctcttccgcagataaatgcgaacccgtacccagtaatacctttaactatatcgatgtggaaattaatctgtatcccgtcaacgacacgtcgtgtactcggacgaccactaccggtctcagtgaatccatctcaacgtcggaactaactattactatgaatcataaagactgtaatcccgtatttcgtgaggaatacttctctgtccttaataaggtagcaacttcaggtttctttacaggagaaaggtgtgcactctgaatttcgagattaaatgcaataacaaagattcttcctccaaacagttaacgaaagcaaagaatgatgacggtatcatgccgcattcggagacagtaactctagtgggcgactgtatatctagcgtcgacatctatatactatatagtaataccaatactcaagactacgaaactgatacaatctcttatcatgtgggtaatgttctcgatgtcgatagccatatgcccggtagttgcgatatacataaactgatcactaattccaaacccacccgctttttatagtaagtttttcacccataaataataaatacaataattaatttctcgtaaaagtagaaaatatattctaatttattgcatggtaaggaagtagaatcataaagaacagtactcaatcaatagcaattatgaaacaatatatcgtcctggcatgcatgtgcctgccagtcttcagcaatcatcctcatcctcatcctcgtgtacggaagaagaaaacaaacatcatatgggaatcgatgttattatcaaagtcacaaagcaagaccaaacaccgaccaatgataagatttgccaatccgtaacggaaattacagagtccgagtcagatccaaatcccgaggtggaatcagaagatgattccacatcagtcgaggatgtagatcctcctaccacttattactccatcatcggtggaggtctgagaatgaactttggattcaccaaatgtcctcagattaaatccatctcagaatccgctgatggaaacacagtgaatgctagattgtccagcgtgtccccaggacaaggtaaggactctcccgcgatcactcatgaagaagctcttgctatgatcaaagactgtgaggtgtctatcgacatcagatgtagcgaagaagagaaagacagcgacatcaagacccatccagtactcgggtctaacatctctcataagaaagtgagttacgaagatatcatcggttcaacgatcgtcgatacaaaatgtgtcaagaatctagagtttagcgttcgtatcggagacatgtgcaaggaatcatctgaacttgaggtcaaggatggattcaagtatgtcgacggatcggcatctgaaggtgcaaccgatgatacttcactcatcgattcaacaaaactcaaagcgtgtgtctgaatcgataactctattcatctgaaattggatgagtagggttaatcgaacgattcaggcacaccacgaattaaaaaagtgtaccggacactatattccggtttgcaaaacaaaaatgttcttaactacattcacaaaaagttacctctcgcgacttcttctttttctgtctcaatagtgtgatacgattatgacactattcctattcctattcctatttcctttcagggtatcacaaaaatattaaacctctttctgatggtctcataaaaaaagttttacaaaaatatttttattctctttctctctttgatggtctcataaaaaaagttttacaaaaatatttttattctctttctctctttgat

SEQ ID NO: 49 - DNA, 196499 bp, Vaccinia virus
  source 1..196499: mol_type = other DNA
  misc_feature 1..196499: note = VIR93
atcaaagagagaaagagaataaaaatatttttgtaaaactttttttatgagaccatcaaagagagaaagagaataaaaatatttttgtaaaactttttttatgagaccatcagaaagaggtttaatatttttgtgataccctgaaaggaaataggaataggaataggaatagtgtcataatcgtatcacactattgagacagaaaaagaagaagtcgcgagaggtaactttttgtgaatgtagttaagaacatttttgttttgcaaaccggaatatagtgtccggtacacttttttaattcgtggtgtgcctgaatcgttcgattaaccctactcatccaatttcagatgaatagagttatcgattcagacacacgctttgagttttgttgaatcgatgagtgaagtatcatcggttgcaccttcagatgccgatccgtcgacatacttgaatccatccttgacctcaagttcagatgattccttgcacatgtctccgatacgaacgctaaactctagattcttgacacattttgtatcgacgatcgttgaaccgatgatatcttcgtaactcactttcttatgagagatgttagacccgagtactggatgggtcttgatgtcgctgtctttctcttcttcgctacatctgatgtcgatagacacctcacagtctttgatcatagcaagagcttcttcatgagtgatcgcgggagagtccttaccttgtcctggggacacgctggacaatctagcattcactgtgtttccatcagcggattctgagatggatttaatctgaggacatttggtgaatccaaagttcattctcagacctccaccgatgatggagtaataagtggtaggaggatctacatcctcgactgatgtggaatcatcttctgattccacctcgggatttggatctgactcggactctgtaatttccgttacggattggcaaatcttatcattggtcggtgtttggtcttgctttgtgactttgataataacatcgattcccatatgatgtttgttttcttcttccgtacacgaggatgaggatgaggatgattgctgaagactggcaggcacatgcatgccaggacgatatattgtttcataattgctattgattgagtactgttctttatgattctacttccttaccatgcaataaattagaatatattttctacttttacgagaaattaattattgtatttattatttatgggtgaaaaacttactataaaaagcgggtgggtttggaattagtgatcagtttatgtatatcgcaactaccgggcatatggctatcgacatcgagaacattacccacatgataagagattgtatcagtttcgtagtcttgagtattggtattactatatagtatatagatgtcgacgctagatatacagtcgcccactagagttactgtctccgaatgcggcatgataccgtcatcattctttgctttcgttaactgtttggaggaagaatctttgttattgcatttaatctcgaaattcagagtgcacacctttctcctgtaaagaaacctgaagttgctaccttattaaggacagagaagtattcctcacgaaatacgggattacagtctttatgattcatagtaatagttagttccgacgttgagatggattcactgagaccggtagtggtcgtccgagtacacgacgtgtcgttgacgggatacagattaatttccacatcgatatagttaaaggtattactgggtacgggttcgcatttatctgcggaagagacggtgtgagaatatgttccgagaccacacggagaacagatgacgtctccggatactccgtatcctattccacattttgtttgggaaacacatgccttgcatccggatgatcctttgagaagacaataatatccgggagagcattcacagattctattgtgagtcgtgttacacgatcgcgtcttccgttacaacttagacaagcgggtaaatgattattgcgagatgtgaaggtacccgaaccacagggtgtacatcgtgtgttagtcttgctatcgcataatctggaagcgtatgttcccggacacaaattatggcgtttgtattcgttgtctttacactttccatcggatggtgcatgcggtgctatatctcttccgtttattattatacatgagagaaacaatatatacgagtataatacggacttcatgatttaataatgtagtaatcgtcgtcttgttcctgtttcctacttctccaatcatatagatattttctttctatcatggataatatttgtaatggttctttccgtacaacatactgtttagatgatattgcgcataatttccggaggcaaatacgatagtctagattgaccgatggtagactctaatttattgagtgctttgtcgacgagtttacttttatgctccatcgatagatggcactgttctatgagatcgtcgtacatgggaaatgaaatgtgtctgtccgaatgtatggctttaagatagctgtgataccgtatacaggtcggtgtcggagattcgaatctctttaaggcgacttatgtcacgatgatggaatctatcttatcgaatgatatatttttcataaatacacttttatagtcctcgtttaaacagaatttactatgtagttccgcgaatgactcgtcccttaataggcagtaggctagtatcttttttacgtagtaatcgtcgtagggagagaattctgacatcttgtagaacaacgatttaatcataggtagagatactttcagtctgtggtggatgatgtcattcacaacatccgccttgtatatgatgtttctgttttcaaacaccaagtcgaataccgtctttagtcggaaggttgatgtcgtatccgatgtatgaggcaacattgttgttacaattttgaaaggcggtattatagtattcgtctttctgaatgtcgaacctatctagtagataccgtagtatattgagagtgtatccttgattatgttttatgaatagataaagtagatgttgtccttcttccttttgttcgtgccaattgagtaacattatgagaatatgacctgttgcacaatcgttccatgatgggtgtacaatcaagattattacgtatcctcgtatcggctcctcgagataaaagagcatacaccacacgaggactatgtttggtatactgttgaaggtaagtgtgtaaccgcgttaatgtttgctccataatctattatcgcgtagatgaatcgcttctcggctcgcatcttagtgtgacttaacttgtaataattgcttttgtagaacgtggatatgtgtttacagtagtaatgaagagaagtgagtccatcctcgtcgacgcaattagggtcggatcctttgtacagaacgtaatagtttaagctcccattgaatttatatctaagataacacagcaatagatcggatgatttactaaagtcatcaatggtgtccgttagtatatcaaagatcttgttatcgattgatagtgaatgaatcagatagtggtgtagaggaatatgtcctttttcatccttgctatcaaagttacgcatgccgtggtgtaacaatatctttaatacagatggattaaatcgtgtattcatcgtatagcaatgtaatggagagttacctcgtttattcagatcgcagtgtttaataactagcttaaacagatgagacgatgtatccacatcaaagaacgtaaaatacatatgacaaacattgttgacagaaacgtgaccttcattcttaccgtcgtccataaatacgttaggtatgtaccacatactgtcgcgaacgatgcgtacaatctcgtccatctcataatgatttactttttcataattaaagatgtgaaagaaaaccgaacaatatatttttttagtaatgtttatgcgagacatataaaataaactccgtgtttatgatgccggtaaatgtttttatcatcttggacggaatcgattttgtaatatgtcatggaaacaaatgaaacaggacattatcgctccatgataaattatttaatggagtaataaagtatctccatgggtaatttcgaaatcaagttatcgtctgtattaatgttgtccactatggagtcgatcctctcattgttctttacagtttctgtaatgatggacgttagttcttttttgtaccatttgatgtcggattctttgcgtatctcaatctgtggcgtttgcttcgtttaaataatatatcaaacatggagacgcctgatatgtaggcattcttcattctattaatgtctactctatagcgctttagttccttatgacgaccggagatatcatacttactttagaaggaaaatcatcatctaggattaaggcgtatctgatacaggcgaataatggttcaggatatagatagcgtatatctctattaaatgcgtcaatcatagtctctagagtgggatggtagctaagtaataaatcaactatcctcgttttgttttctcttctgtaactacttttctggatggccgtattgattatcgagcgtgatgttgtaacactcgctccatattccaataaccgctttgcaaattgtatattattgacatcgaccgcgtaatatagtagagttttattctcattatcgatcatatctatattatccatgtacttgcttagtatatcaaatacatctattagtatggtttcataacagtgatacccgcaattattaaatctcgataatatcagaccgtacatacatagacggccattgttcgatacgtgatttacagccatgtgtccattattttccacgataaaccttacgacgtttacatcgacgagattattattaacaaagtagtcgtgcagaggatagttgttgtccgttatctaacatgcatcgaacgaccatatcgccgtaatgtaagtagtttatcaacatggcttgtacgatggattcatcctgttgtctaaatctctttagaatgttatcgatgatgtagtggttatagtctctggaatcgtaagaagtaatactacgcattacgtcgacaagagtatgacgtctctcaataagaagattaacgatttccatgtctacattatatggggttactctaaatcgcttgtttagataatccgcctctaatatagggctgacgtcgtatactctacacgtgtccacatcctttattaataatttaacaatctctatatctatggttgagcaagaccagtagtattggatgggtaaagatcctccttcgtctctgccatggatggaaacattgttattgatcaaacatttaattacatccttggatagagattgagattctctatgagacgatatatagtaatgaagagagttcttacacatatcactgtcgtacatacaggtacgaaatacgtaaccggtgctgtaacattctgatttaagaagccatagcaatacttctggtctcggattaggcgtcgttacgtatatatccaccaatccgagaccattgattgcataattcgtattcttggacggacgtatccgtttatccacaattaggtattttagcagacgtaagtcgatattatccgaagacatatacgaatacagatcgaaatcatttatattcgacttgagttcgttagaggaattcgaatagctggatatcagtagatgcacaatttgagattttacgtatctatgcttactgtatgctcctagcggagttaatccttcgttgtttctacaaagtctctcgactccgcgagagagtaacagtcgaacaatcttaatgtctgtatcgcatttattgaagacgtaacaatgtagcgcattgtttcctcgtctatctatatgttttgataagttgtgacacgtttcaatttctagttttatttttttgtacgtcacatcttcatccagtagacgacatagaatacatgtgcaatccatagctattctggtgctaattattcctatttcacgaaaaatgatgaaggcaatcattcctcataagatgataaaaagtgtagtgagagagcatgaaggagatttagtatttagcagtgcggatatgatccaagagggtgagatagtcgttctcgttcagaatctttcgcagcataagtagtatgtcgatatacttatcgttgaagactcttccagagacgatagctgattgagtacaaagtccaatgattgcacgaagttcttcggcggttttcatggagtcatttctgatgaaacatttaatgatctccacgcaattgtcgatattgtcccacggaagtgaatccttcaactcaccaccaaagagctccgttgcatcagttctgaaagagatgagaagcctgtagagagaccctgcgctttctctatgggtccatctatgagaaacccacaggatgtattcagtcagacaatgtctgacgtcggccacggtattcagggagtccttagtagcgtggcaatgacagggtctgaactgggcacaaggagaggccattgtaaaggtagacctgtagccgtttatgctaatagagggctttaatttccatttttttaatgggttgtggatgaggaatgagagtgatatcatattgagatacgtagttatgtagaggtgtatttcctatattatttactttcggtttcatattttaccaactctttaataaatttcttttcacgatgcatcttattaaatgacgttttctcataagtggacatatagatgcagaagtaatgaagaaaagtattacctctatcatctacataattagggtctgctcctttttttaacaacttatacagtacgtagtagtagtttatcggttttaaatcaagtctagaatatatagtggattaatatatttttatattagctaaagctatctatactatcagaaagcatatcattctcaacttcatcatgagttaaatatttgtgtaatggatgtcatgaacattaaacgtattcatgacatactcctttaataggttttttaaaacagatgattcaaatccttcattcattagataacagtgtaacggagtcgtaccttctactagtttgtttatatcacagcattctacaaacagtctaaacaatagagaagacggacagactttaacgtataaatgacacatgttatcgatattcgttgatgaattattattaaacgtagttatgataaatgattctaacgacatctctcgctagagataaaatctagtatcgtatcattaaacatctttgcatcatactcgcatagcatagtttttcataattaatacaatatttaaaagacttattcggaaagtattttaatacatgtatcatcgatggagatccatatgaggagtcacttgtagttcttcagtagtaataacagtgctatcatcgatagtataattatatgtagaaggttcatatgttgttgtaattggagtaactgttggtagttcttccgtggaatcaataattatactaacagcaatagtataattatataaatatgttccgttgatatcacatattttaatgaactcatttctaacaccctcagctatatctgtccaattaaatgtagccaacaatctactacgttctctttgattgactacttgtacggtagcgacgctacactatctttattgtcttctacatgctccaattgaatgtcatgatacaacgcagtttttcttatgcatgtttcataacaccacgaacatgtcgcagtaagatatatagccagagataatttctgtaaattcatgattgccggtcataaacaagcccgtcaataattgtggctatatattcagtttatagagcaaaataattaagcacaatagcgcttaatctcaaaatatgttatgtttatttttttcatattaaacatactggttaaaatcctctaaaggctgatcttcatctataaatcaagatcataattacatttagacagtggtttcatgtttataaaaatgttctttttgtgtgaataaggaatatactaatcaataatcaaccatcgaccccattacgatagtatgcaggcaaccccccattagagaggtacgtgtaatcagtctctccagttttagtatttttataagtcattgttacataaacggcttttaaacagtctcctcgataataagccatatctggaaatttattaaatactcgagtcattttacgcacggtcaaaaaagtaagtaatgtcgacgacttcttacattctatagaaacacctagaatactcattttcttttggaaaatatcctcagactctgatttgaacaatgcacgacctatagtaaaccgtgaccaataagttatattagtcaatggtatatccaaaccatcaggtgtggatagtacgccgatagtccagtctttggtatcgatagtgtagttattgaactgagaagttaccgtatagtctttttggtcatctctaaacaaggaaactaatacctctacactattgaacgatttatcttccgtaatgggtggaataacgggaatataaagtggactagcgatggatgaagtcacgaatataagacacgctattaatccgtatatcatcattttgatattacttataataacgatttgtttaatttttagtttatactattaattgtaaatgatattattatttttttaagtattatcagctttagtttatactattactatttgtaatatttagacatagataaacgtgataaaagtctatttgtttatatttattgcggatagcagtatttccctataaaaagtatacgtcctgtgttgtctttaatcatgtacatgaatggatggtttatgtagaccttcgtacgatataccatcgaaaagttagtcataaatactcctgtaacggccgatgcttctgtatactcctcattaacatctataaacgtcgtatgtagaaatttttctacagtgatagtttcattacacatcttgctaaaatctgcataatatccgaatatattagtaagtcctaaattttctaaaatcggtaccagattatacggttctgtcatttccactttaaactttggcatatacaagtctatacttttagtagataacataccacaccattttttaaatttttcatctgttatatttttttctatgttatatataccttctatgtcgtccggtagtataattaccatactagagtttccctcgtatggaatatcgataatagagaatcctccgaataattcattaatatgtacatattgcaagttattctcggtacccaccatcatatcaacactggtaactatattcttagaaatataaaacttgtctgtatatgtaagatgtttagaaaatggatatttccacattgctttaaaatggacggcgctaacaactgtcatacgagtattaatggatagcggactagtcaataaggaattaattttaccatttgtcatcgtcttaacccattcgttgattagttcctttgtttggttagcattattaaagtttacagtttgaaaatcgtcttttattttttgtaggaaggaggcgtggaactcgatactatcgctaccgtatattttatttgcggtagctagtgtcgcacaatacggaatatctacgtccatgtcattattgtcatccttcttatcatcgggtgtattctcattcatattctctatatattttgatagttgttcagctgtagaaccagctgctccatgatttagaatagataaagtagataaaatagaaactggagaaatcaaaacattttcatcagggtgttttaagattagttctttaaagatatccatggtatagaccaaacaataacgataacgatatatatcataaataaataatgttaaatttcagtttatgtttgtaccccgtattcatacttaacaaattggtattgcgtacacaatcaatcatattacataccattaataatgcaagcataaaaaatcgttagtagatgtttctaaatataggttccgtaagcaaagaatataagaatgaagcggtaatgataaaatcaatcgttatctaaaatgatcatactcatttattttattctattatattaacacatacatttttaacagcaacacattcaatattgtattgttatttttatattatttacacaattaacaatatattattagtttatattactgaattaataatataaaattcccaatcttgtcataaacacacactgagaaacagcataaacacaaaatccatcaaaaatgtcgatgaaatatctgatgttgttgttcgctgctatgataatcagatcattcgccgatagtggtaacgctatcgaaacgacattgccagaaattacaaacgctacaacagatattccagctatcagattatgcggtccagagggagatggatattgtttacacggtgactgtatccacgctagagatatcgacggtatgtattgtagatgctctcatggttatacaggcattagatgtcagcatgtagtattagtagactatcaacgttcagaaaaaccaaacactacaacgtcatatatcccatctcccggtattgtgcttgtattagtaggcattattattatgtgttgtctattatctgtttataggttcactcgaagaactaataaactacctctacaagatatggttgtgccataatttttataaatttttttatgagtatttttacaaaaaaaatgtataaagtgtatgtcttatgtatatttataaaaatgctaagtatgcgatgtatctatgttatttgtatttatctaaacaatacctctacctctagatattatacaaaaattttttatttcggcatattaaagtaaaatctagttaccttgaaaatgaatacagtgggtggttccgtatcaccagtaagaacataatagtcgaatacagtatccgattgagattttgcatacaatactagtctagaaagaaatttgtaatcattttctgtgacgggagtccatatatctgtatcatcgtctagtttatcagtgtcccatgctatatttctgttatcatcattagttaatgaaaataactctcgtgcttcagaaaagtcaaatattgtatccatacatacatctccaaaactatcgcttatacgtttatctttaacgatacctatacctagatggttatttactaacagacattttccagatctattgactataactcctatagtttccacatcaaccaagtaatgatcatctattgttatataacaataacataactcttttccatttttatcagtatgtatatctatatcaacgtcgtcgttgtagtgaatagtagtcattgatctattatatgaaacggatatgtctagaacggcaattgtcttacgtccagttaacactttcgttgatttaaagtctagagtctttgcaaacataatatccttatccgactttatatttcctgtagggtggtataattttattttgcctccacatatcggtgtttccaaatatattactagacaatattccatatagttattagttaagggtacccaattagaacacgtacgcttattatcatcatttggatcgtatttcataaaagttattgtactatcgatgtcaacacattctacattttttaatcgtctatatagtatttttctgatattttctataatatcagaattgtcttccatcggaagttgtatactatcggaatcagttacatgtttaaataattctctgatgtcattccttatacaatcaaattcattattaaacagtttaatagtctgtagacctttatcgtcgtaaatatccattgtcttattagttacgcttatttttatgtgttttacgttgctttattatattttataagaatgattgtttgacgaatcacgagaactattaagacacattattaggtatatattataaaaaagtttttgattacgatgttataagaggaaagaggacacattaacatcatacatcaattaactacattcttataacatcgtaatcaaaagaattgcaattttgatgtataacaactgtcaatgggttatggaattgtatattacatattatacggtatgttggtaacgacaaataccgatcggtaatcgtttgccggtgtaatagaattatatatatctatctattacaccggctgagtatacataataataagttgtggtagtatgatctccatatttataatttaggactttgtattcagtatttttggaatcataaaaaataaaaaaaagttttactaatttaaaatttaaaaagtatttacatttttttcactgtttagtcgcggatatggaattcgatcctgccaaaatcaatacatcatctatagatcatgtaacaatattacaatacatagatgaaccaaatgatataagactaacagtatgcattatccgaaatattaataacattacatattatatcaatatcacaaaaataaatacacatttggctaatcaatttcgggcttggaaaaaacgtatcgccggaagggactatatgactaacttatctagagatacaggaatacaacaatcaaaacttactgaaactatacgtaactgtcaaaaaaatagaaacatatatggtctatatatacactacaatttagttattaatgtggttattgattggataaccgatgtgattgttcaatcaatattaagagggttggtaaattggtacatagctaataatacctatactccaaatacacccaataatacaacaaccatttctgagttggatatcatcaaaatactaaataaatacgaggacgtgtatagagtaagtaaagaaaaagaatgtggaatttgctatgaagttgtttactcaaaacgattagaaaacgatagatactttggtttattggattcgtgtactcatatattttgcataacatgcatcaatatatggcataaaacacgaagagaaaccggtgcgtcggataattgtcctatatgtcgtacccgttttagaaacataacaatgagcaagttctataagctagttaactaataaataaaaagtttaatttgttgacgacgtatgtcgttattttttctcgtataaaagattaatttgattctaatataatctttagtattggataaatatcaattcaaattaattccattagattatatcataaataaaaatagtagcacgcactacttcagccaaatattcttttttgaaacgccatctatcgtagtgaggacacaagtgaacctataatgagcaaatttattagtatcggttacatgaaggactttacgtagagtggtgattccactatctgtggtacgaacggtttcatcttctttgatgccatcacccagatgttctataaacttggtatcctcgtccgatttcatatcctttgccaaccaatacatatagctaaactcaggcatatgttccacacatcctgaacaatgaaattctccagaagatgttacaatgtctagatttggacatttggtttcaaccgcgttaacatatgagtgaacacacccatacatgaaagcgatgagaaataggattttcatcttgccaaaatatcactagaaaaaatttatttatcaattttaaaggtataaaaaatacttattgttgctcgaatattttgtatttgatggtatacggaagattagaaatgtaggtattatcatcaactgattctatggttttatgtattctatcatgtttcactattgcgttggaaataatatcatatgcttccacatatattttattttgttttaactcataatactcacgtaattctggattattggcatatctgtgaataattttagctccatgatcagtaaatattaatgagaacatagtattaccacctaccattatttttttcatttcgttcaattcttgattgcaaagatctatataatcattatagcgttgacttatggactctggaatcttagacgatgtacagtcatctataatcatggcatatttaatacattgttttatagcatagtagttatctacgatgttagatatttctctcaatgaatcaatcacacaatctaatgtaggtttatgacataatagcattttcagcagttcaatgtttctagattcgttgatggcaatggctatacatgtatatccgttatttgatctaatgttgacatctgaaccggattctagcagtaaagatactagagattgtttattatatctaacagccttgtgaagaagtgtttctcctcgtttgtcaatcatgttaatgtctttaagataaggtaggcaaatgtttatagtactaagaattgggcaagcataagacatgtcacaaagaccctttttgtatgtataagtgtagaaattataacatccatagttggatttacataggtgtccaatcgggatctctccatcatcgagatgattgacggcatctcccccttccttttttagtagatatttcatcgtgtaagaatcaatattaatatttctaaagtatccgtgtatagcctctttatttaccacagctccatattccaacatgcattccactaaagggatatcgatatcgccgaatgtcatatactcaattagtatatgttggaggacatccgagttcattgttttcaatatcaaagagatggtttccttatcatttctccatagtggtacaatactacacattattccgtgaggctttccattctccaaaaacaatttgaccaaatctacatctttattgtatctataatcactatttagataatcagccataattcctcgagtgcaacatgttagatcgtctatatatgaataagccgtgttatctattcctttcattaacaatttaacgatgtctatatctatatgagatgacttaatataatattgaagagctgtacaatagtttttatctatagaagacggcttgattccgtgattaattagacatttaacaacttccggacgcacatatgctctcgtatccgactctgaatacagatgagagatgatatacagatgcaatacggtaccgcaatttcgtagttgataatcatcatacgcgtatccgtactcgtcctcataaagaacactgcagccattttctatgaacaaatcaataattttaggaacaggatcattgtcattacataattttctataactgaacgatggttttcacatttaacactcaagtcaaatccatgttctaccaacacctttatcaagtcaacgtctacatttttggatttcatatagctgaatatattaaagtcatttatgttgctaaatccagtggcttctagtagagccatcgctatatcctttaactttaacatgtctactatttgtgtattcttctaatggggtagctgtctccaatttttgcgtaatggattagtgccactgtctagtagtagtttgacgacctcgacattattacaatgctcattaaaaaggtatgcgtgtaaagcattattcttgaattggttcctggtatcattaggatctctgtctctcaacatctgtttaagttcatcgagagccacctcctcattttccaaatagtcaaacattttgactgaatagaagtgaatgagctactgtgaactctatacacccacacaactaatgtcattaaatattatttttttgaatgtatttataccatgtcaaaaacttgtacaattattaataaaaataatttagtgtttaaattttaccagttccagattttacacctccgttaaccccactttttacaccactggacgaccctcctccccacattccaccgccaccagatgtataagttttagatcctttattactaccatcatgtccatggataaagacactccacatgccgccactaccccctttagaagacatattaataagacttaagagttaaggacaagtttaacaataaaattaatcacgagtaccctactaccaacctacactattatatgattatagtttctatttttacagtaccttaactaaagtttctagtcacaagagcaatactaccaacctacactattatatgattatagtttctatttttataggaacgcgtacgagaaaatcaaatgtctaatttctaacggtagtgttgataaacgattatcgtcaatggatacctcctctatcatgtcgtctattttcttactttgttctattaacttattagcattatatattatttgattataaaacttatattgcttattagcccaatctgtaaatatcggattattaacatatcgtttctttgtaggtttatttaacttgtacatcactgtaagcatgtccgtaccatttattttaatttgacgcatatccgcaatttctttttcgcagtcggttataaattctatatatgatggatacatgctacatgtgtacttataatcgactaatatgaagtacttgatacatattttcagtaacgatttattattaccacctatgaataagtacctgtgatcgtctaggtaatcaactgttttcttaatacattcgatggttggtaatttactcagaataatttccaatatcttaatatataattctgctatttctggaatatatttatctgccagtataacacaaatagtaatacatgtaaacccatattttgttattatattaatgtctgcgccattatctattaaccattctactaggctgacactatgcgacttaatacaatgataaagtatactacatccatgtttatctattttgtttatatcatcaatatacggcttacaaagttttagtatcgataacacatccaactcacgcatagagaaggtagggaataatggcataatatttattaggttatcatcattgtcattatctacaactaagtttccattttttaaaatatactcgacaactttaggatctctattgccaaatttttgaaaatatttatttatatgcttaaatctatataatgtagctccttcatcaatcatacatttaataacattgatgtatactgtatgataagatacatattctaacaatagatcttgtatagaatctgtatatcttttaagaattgtggatattaggatattattacgtaaactattacacaattctaaaatataaaacgtatcacggtcgaataatagttgatcaactatataattatcgattttgtgatttttcttcctaaactgtttacgtaaatagttagatagaatattcattagttcatgaccactatagttactatcgaataacgcgtcaaatatttcccgtttaatatcgcatttgtcaagataataatagagtgtggtatgttcacgataagtataataacgcatctctttttcgtgtgaaattaaatagtttatcacgtccaaagatgtagcataaccatcttgtgacctagtaataatataataatagagaactgttttacccattctatcatcataatcagtggtgtagtcgtaatcgtaatcgtctaattcatcatcccaattataatattcaccagcacgtctaatctgttctattttgatcttgtatccatactgtatgttgctacatgtaggtattcctttatccaataatagtttaaacacatctacattgggatttgatgttgtagcgtatttctctacaatattaataccatttttgatactatttatttctatacctttcgaaattagtaatttcaataagtctatatcgatgttatcagaacatagatattcgaatatatcaaaatcattgatatttttatagtcgactgacgacaataacaaaatcacaacatcgtttttgatattattatttttcttggtaacgtatgcctttaatggagtttcaccatcatactcatataatggatttgcaccactttctatcaatgattgtgcactgctggcatcgatgttaaatgttttacaactatcatagagtatcttatcgttaaccatgattggttgttgatgctatcgcattttttggtttctttcatttcagttatgtatggatttagcacgtttgggaagcataagctcatatgatttcagtactgtagtgtcagtactattagtttcgatcagatcaatgtctagatctatagaatcaaaacacgataggtcagaagataatgaatatctgtaggcttcttgttgtactgtaacttctcgttttgttagatggttgcatcgtgctttaacatcaatggtacaaattttatcctcgctttgtgtatcatattcgtccctactataaaattgtatattcagattatcatgagatgtgtatacgctaacggtatcaataaacggagcacaccatttagtcataaccgtaatccaaaaatttttaaagtatatcttaacgaaagaagttgtgtcattgtctacggtgtatggtactagatcctcataagtgtatatatctagagtaatgtttaatttatcaaatggttgataatatggatcctcatggcaatttcctaagacgaaaataagacataaacacgcaataaatctaattgcggacatggttactccttaaaaaaatactaataatcaccttggctatttagtaagtgtcatttaacactatactcatattaatccatggactcataatctctatacgggattaacggatgttctatatacggggatgagtagttctcttctttaactttatactttttactaatcatatttagactgatgtatgggtaatagtgtttgaagagctcgttctcatcatcagaataaatcaatatctctgtttttttgttatacagatgtattacagcctcatatattacgtaatagaacgtgtcatctaccttattaactttcaccgcatagttgtttgcaaatacggttaatcctttgacctcgtcgatttccgaccaatctgggcgtataatgaatctaaactttaatttcttgtaatcattcgaaataatttttagtttgcatccgtagttatcccctttatgtaactgtaaatttctcaacgcgatatctccattaataatgatgtcgaattcgtgctgtatacccatactgaatggatgaacgaataccgacggcgttaatagtaatttactttttcatctttacatattgggtactagttttactatcataagtttataaattccacaagctactatggaataagccaaccatcttagtataacacacatgtcttaaagtttattaattaattacatgttgttttatatatcgctacgaatttaaacagagaaatcagtttaggaaaaaaaattatctatctacatcatcacgtctctgtattctacgatagagtgctactttaagatgagacatatccgtgtcatcaaaaatatactccattaaaatgattattccggcagcgaacttgatattggatatatcacaacctttgttaatatctacgacaatagacagcagtcccatggttccataaacagtgagtttatctttctttgaagagatattttgtagagatcttataaaactgtcgaatgacatcgcatttatatctttagctaaatcgtatatgttaccatcgtaatatctaaccgcgtctatcttaaacgtttccatcgctttaaagacgtttccgatagatggtctcatttcatcagtcatactgagccaacaaatataatcgtgtataacatctttgatagaatcagactctaaagaaaacgaatcggctttattatacgcattcatgataaacttaatgaaaaatgtttttcgttgtttaagttggatgaatagtatgtcttaataattgttattatttcattaattaatatttagtaacgagtacactctataaaaacgagaatgacataactaatcataactagttatcaaagtgtctaggacgcgtaattttcatatggtatagatcctgtaagcattgtctgtattctggagctattttctctatcgcattagtgagttcagaatatgttataaatttaaatcgaataacgaacataactttagtaaagtcgtctatattaactcttttattttctagccatcgtaataccatgtttaagatagtatattctctagttactacgatctcatcgttgtctagaatatcacatactgaatctacatccaattttagaaattggtctgtgttacatatctcttctatattattgttgatgtattgtcgtagaaaactattacgtagaccattttctttataaaacgaatatatagtactccaattatctttaccgatatatttgcacacataatccattctctcaatcactacatctttaagattttcgttgttaagatatttggctaaactatataattctattagatcatcaacagaatcagtatatatttttctagatccaaagacgaactctttggcgtcctctataatattcccagaaaagatattttcgtgttttagtttatcgagatctgatctgttcatatacgccatgattgtacggtacgttatgataaccgcataaaataaaaatccattttcatttttaaccaatactattcataattgagattgatgtaatactttgttactttgaacgtaaagacagtacacggatccgtatctccaacaagcacgtagtaatcaaatttggtgttgttaaacttcgcaatatttatcaatttagatagaaacttatactcatcatctgttttaggaatccatgtattattaccactttccaacttatcattatcccaggctatgtttcgtccatcatcgttgcgcagagtgaataattcttttgtattcggtagttcaaatatataatccatgcatagatcggtaaagctattgtagatgtgatttttcctaaatctaatataaaactcgtttactagcaaacactttcctgatttatcgaccaagacacatatggtttctaaatctatcaagtggtggggatccatagttatgacgcagtaacatagattattaccttcttaactgtcgctaatatctatatatttattgttatcgtattggattctgcatatagatggcttgtatgtcaaagatatagaacacataaccaatttatagtcgcgctttacattctcgaatctaaagttaagagatttagaaaacattatatcctcggatgatgttatcactgtttctggagtaggatatattaaagtctttacagatttcgtccgattcaaataaatcactaaataatatcccacattatcatctgttagagtagtatcattaaatctattatattttatgaaagatatatcactgctcacctctatatttcgtacatttttaaactgtttgtataatatctctctgatacaatcagatatatctattgtgtcggtagacgataccgttacatttgaattaatggtgttccattttacaacttttaacaagttgaccaattcatttctaatagtatcaaacgctccatgattaaatattttaatagtatccattttatatcactacggacacaaagtagctgacataaaccattgtataatttttatgttttatgtttattagcgtacacattttggaagttccggcttccatgtatttcctggagagcaagtagatgatgaggaaccagataggttatatccgtacttgcacttaaagtttacattgtcgttgtatgagtatgatcttttaaacccgctagacaagtatccgtttgatattgtaggatgtggacatttaacaatctgacacgtgggtggatcggaccattctcctcctgaacacaggacaccagagttaccaatcaacgaatatccactattgcaactataagttacaacgcttccatcggtataaaaatcctcgtatccgttatgtcttccgttggatatagatggaggggattggcatttaacagattcacaaataggtgcctcgggattccataccatagatccagtagatcctaattcacaatacgatttagattcaccgatcaaatgatatccgctattacaagagtacgttatactagagccaaagtctactccgccaatatcaagttggccattatcgatatctcgaggcgatgggcatctccgtttaatacattgattaaagagtgtccatccagtacctgtacatttagcatatataggtcccattttttgctttctgtatccaggtagacatagatattctatagtgtctcctatgttgtaattagcattagcatcagtctccacactattcttaaatttcatattaatgggtcgtgacggaatagtacagcatgatagaacgcatcctattcccaacaatgtcaggaacgtcacgctctccaccttcatatttatttatccgtaaaaatgttatcctggacatcgtacaaataataaaaagcccatatatgttcgctattgtagaaattgtttttcacagttgctcaaaaacgatggcagtgacttatgagttacgttacactttggagtctcatctttagtaaacatatcataatattcgatattacgagttgacatatcgaacaaattccaagtatttgattttggataatattcgtattttgcatctgctataattaagatataatcaccgcaagaacacacgaacatctttcctacatggttaaagtacatgtacaattctatccatttgtcttccttaactatatatttgtatagataattacgagtctcgtgagtaattccagtaattacatagatgtcgccgtcgtactctacagcataaactatactatgatgtctaggcatgggagacttttttatccaacgatttttagtgaaacattccacatcgtttaatactacatatttttcatacgtggtataaactccacccattacatatatatcatcgtttacgaataccgacgcgcctgaatatctaggagtaattaagtttggaagtcttatccatttcgaagtgccgtgtttcaaatattctgccacacccgttgaaatagaaaattctaatcctcctattacatataactttccattgttaacacaagtactaacttctgattttaacgacgacatattagtaaccgttttccattttttcgtttcaagatctacccgcgatacggaataaacatgtctattgttaatcatgccgccaataatgtatagacaattatgtaaaacatttgcattatagaattgtctatctgtattaccgactatcgtccaatattctgttctaggagagtaatgggttattgtggatatataatcagagtttttaatgactactatattatgttttataccatttcgtgtcactggctttgtagatttggatatagttaatcccaacaatgatatagcattgcgcatagtattagtcataaacttgggatgtaaaatgttgatgatatctacatcgtttggatttttatgtatccactttaataatatcatagctgtaacatcctcatgatttacgttaacgtcttcgtgggataagatagttgtcagttcatcctttgataattttccaaattctggatcggatgtcaccgcagtaatattgttgattatttctgacatcgacgcattatatagttttttaattccatatcttttagaaaagttaaacatccttatacaatttgtggaattaatattatgaatcatagtttttacacatagatctactacaggcggaacatcaattattatggcagcaactagtatcatttctacattgtttatggtgatgtttatcttcttccagcgcatatagtctaatagcgattcaaacgcgtgatagtttataccattcaatataatcgcttcatcctttagatggtgatcctgaatgcgtttaaaaaaattatacggagatgccgtaataatttccttattcacttgtataatttccccattgatagaaaatatcacgctttccattcttgaagtactataagtaattatagtataatgtaaaggtttatatattcaatattttttataaaaaaatcatttcgacattaattcctttttaaatttccgtctatcatctatagaaacatattctatgaatttataaaatgcttttacgtgtcctatcgtaggcgatagaaccgctaaaaagcctattgaatttctacaaaagaatctattatatggtatagggagagtataaaacattaaatgcccgtacttattaaagtattcagtagccaatcctaactctttcgaatacttattaatggctcttgttctgtacgaatctatttttttgaacaacggacctagtggtatatcttgttctatgtatctaaaataatgtctgactagatccgttagtttaatatcctcagtcatcttgtctagaatggcaaatctaactgcgggtttaggctttagtttagtttttatatctacatctatgtctttatctaacaccaaaaatataatagctaatattttattacaatcatccggatattcttctacgatctcactaactaatgtttctttggttatactagtatagtcactatcggacaaataaagaaaatcagatgatcgatgaataatacatttaaattcatcatctgtaagatttttgagatgtctcattaaaatattattagggtcagtactcattatcattaggcagctattacttattttattatttttcaccatatagatcaatcattagatcatcaaaatatgtttcaatcatcctaaagagtatggtgaatgactcttcccatctaatttctgaacgttcaccaatgtctctagccactttggcactaatagcgatcattcgcttagcgtcttctatattattaactggttgattcaatctatctagcaatggaccgtcggacagcgtcattctcatgttcttaatcaatgtacatacatcgccgtcatctaccaattcatccaacaacataagctttttaaaatcatcattataataggtttgatcgttgtcatttctccaaagaatatatctaataagtagagtcctcatgcttagtaatttaactattttagttaacaactattttttatgttaaatcaattagtacaccgctatgtttaatacttattcatattttagtttttaggattgagaatcaatacaaaaattaatgcatcattaattttagaaatacttagtttccacgtagttaatgaaacatttgaactcatcgtacaagacgttctcgtacaggacgtaactataaaccggtttatatttgttcaagatagatacaaatccgataactttttttacgaattctacgggatccactttaaaagtgtcataccgggttctttttatttttttaaacagatcaatggtgtgatgttgattaggtcttttacgaatttgatatagaatagcgtttacatattctccataatggtcaatcgccatttgttcgtatgtcataaattctttaattatatgacactgtgtattgtttagttcatccttgttcattgttaggaatctatccaaaatggcaattatactagaactataggtgcgttgtatacacatattgatgtgtctgtttatacaatccatgatatttggatccatgctactaccttcgggtaaaattgtagcatcatataccatttctagtactttaggttcattattatccattgcagaggacgtcatgatcgcatcctaaaaaaatatattatttttatgttattttgttaaaaataatcatcgaatacttcgtaagatactccttcatgaacataatcagttacaaaacgtttatatgaagtaaagtatctacgatttttacaaaagtccggatgcataagtacaaagtacgcgataaacggaataataatagatttatctagtctatctttttctatagctttcatagttagatacatggtctcagaagtaggattatgtaacatcagcttcgataaaatgactgggttatttagtcttacacattcgctcatacatgtatgaccgttaactacagagtctacactaaaatgattgaacaatagatagtctaccattgtttcgtattcagatagtacagcgtagtacatggcatcttcacaaattatatcattgtctaatagatatttgacgcatcttatggatcccacttcaacagccatcttaaaatcggtaaaatcatattgctttcctttatcattaataatttctaaaacatcatctctatcataaaagatacaaatattaactgtttgatccgtaataacattgctagtcgatagcaatttgttaataagatgcgctgggctcaatgtcttaataagaagtgtaagaggactatctccgaatttgttttgtttattaacatccgttgatggaagtaaaagatctataatgtctacattcttgactgttttagagcatacaatatggagaggtgtatttccatcatgatctggttttgagggactaattcctagtttcatcatccatgagattgtagaagcttttggattgtctgacataagatgtctatgaatatgatttttgccaaatttatccactatcctggcttcgaatccgatggacattatttttttaaacactctttctgaaggatctgtacacgccaacaacggaccacatccttcttcatcaaccgagttgttaatcttggctccatactgtaccaataaatttattctctctatgacttcatcatctgttcccgagagataatatagaggcgttttatgctgtttatcacacgcgtttggatctgcgccgtgcgtcagcagcatcgcgactattctattattattaattttagaagctatatgcaatggataatttccatcatcatccgtctcatttggagagtatcctctatgaagaagttcttcgacaaatcgttcatctagtcctttaattccacaatacgcatgtagaatgtgataattatttccagaaggttcgatagcttgtagcatattcctaaatacatctaaatttttactattatatttggcataaagagatagataatactcggccgacataatgttgtccattgtagtataaaaattaatatttctatttctatttctgtatatttgcaacaatttactctctataacaaatatcataacttagttcttttatgtcaagaaggcactggtttagttcatctataaatgtcacgccataactaccacgcatgctatactcagaattatgataaagatatttatccttggggtgtaggtaatggggattaatctttgttggatcagtctctaagttaacacatgtcacacatgatccatttatagttatatcacacgatgatgatttatgaattgattccggaagatcgctatcgtattttgtggttccacaattcatttccatacatgttattgtcacactaatattatgatgaactttatctagccgctgagtggtaaacaacagaacagatagtttattatctttaccaacaccctcagccgctgccacaaatctctgatccgtatccatgatggtcatgtttatttctagtccgtatccagtcaacactatgttagcatttctgtcgatatagctttcactcatatgacactcaccaataatagtagaattaatgtcgtaatttacaccaatagtgagttcggcggcaaagtaccaataccggtaatcttgtcgaggaggacatatagtattcttgtattctaccgaatacccgagagatgcgatacaaaagagcaagactaatttgtaaaccatcttactcaaaatatgtaacaatagtacgatgcaatgagtaagacaataggaaatctatcttatatacacataattattctatcaattttaccaattagttagtgtaatgttaacaaaaatgtgggagaatctaattagtttttctttacacaattgacgtacatgagtctgagttccttgtttttgctaattatttcatccaatttattattcttgactatatcgagatcttttgtataggagtcagacttgtattcaacatgcttttctataatcattttagctatttcggcatcatccaatagtacattttccagattagcagaatagatattaatgtcgtatttgaacagagcctgtaacatctcaatgtctttattatctatagccaatttaatgtccggaatgaagagaagggaattattggtgtttgtcgacgtcatatagtcgagcaagagaatcatcatatccacgtgtccattttttatagtggtgtgaatacaactaaggagaatagccagatcaaaagtagatggtatttctgaaagaaagtatgatacaatacttacatcattaagcatgacggcatgataaaatgaagttttccatccagttttcccatagaacatcagtctccaatttttcttaacaaacagttttaccgtttgcatgttaccactatcaaccgcataatacaatgcagtgtttcccttgtcatcaaattgtgaatcatccagtccactgaatagcaaaatctttactattttggtatcttccaatgtggctgcctgatgtaatggaaattcattctctagaagatttttcaatgctccagcgttcaacaacgtacatactagacgcacgttattatcagctattgcataatacaaggcactatgtccatggacatccgccttaaatgtatctttactagagagaaagcttttcagctgcttagacttccaagtattaattcgtgacagatccatgtctgaaacgagacgctaattagtgtatattttttcattttttataattttgtcatattgcaccagaattaataatatctctaatagatctgattagtagatacatggctatcgcaaaacaacatatacacatttaataaaaataatatttattaagaaaattcagatttcacgtacccatcaatataaataaaataatgattccttacaccgtacccatattaaggagattccaccttacccataaacaatataaatccagtaatatcatgtctaatgatgaacacaaatggtgtattaaattccagtttttcaggagatgatctcgccgtagctaccataatagtagatgcctctgctacagttccttgttcgtcgacatctatctttgcattctgaaacattttataaatatataatgggtccctagtcatatgtttaaacgacgcattatctggattaaacatactaggagccatcatttcggctatcgacttaatatccctcttattttcgatagaaaatttagggagtttaagattgtacactttattccctaattgaaacgaccaatagtctaattttgcagccgtaatagaatctgtgaaatgggtcatattatcacctattgccaggtacatactaatattagcatccttatacggaaggcgtaccatgtcatattctttgtcatcgattgtgattgtatttccttgcaatttagtaactacgttcatcatgggaaccgttttcgtaccgtacttattagtaaaactagcattgcgtgttttagtgatatcaaacggatattgccatgtacctttaaaatatatagtattaatgattgcccatagagtattattgtcgagcatattagaatctactacattagacataccggatctacgttctactatagaattaattttattaaccgcatctcgtctaaagtttaatctatataggccgaatctatgatattgttgataatacgacggtttaatacacacagtattatctacgaaactttgataagttagatcagtgtacgtatatttagatgttttcagcttagctaatcctgatattaattctgtaaatgctggacccagatctctttttctcaaatccatagtcttcaataattctattctagtattacctgatgcaggcaatagcgacataaacatagaaaacgaatagccaaacggcgagaagacaatattatcatcttgaatatttttatacgctactataccggcattggtaaatccttgcagacgataggtagacgctgaacacgttaacgatagtatcaataacgcaatcatgattttatggtattaataattaaccttatttttatgttcggtataaaaaaattattgatgtctacacatccttttgtaattgacatctatatatccttttgtataatcaactctaatcactttaacttttacagttttccctaccagtttatccctatattcaacatatctatccatatgcatcttaacactctctgccaagatagcttcagagtgaggatagtcaaaaagataaatatatagagcataatccttctcgtatactctgccctttattacatcgcccgcattgggcaacgaataacaaaatgcaagcatcttgttaacgggctcgtaaattgggataaaaattatgtttttatatctattttattcaagagaatattcaggaatttctttttccggttgtatctcgtcgcagtatatatcatttgtacattgtttcatattttttaatagtttacaccttttagtaggactagtatcgtacaattcatagctgtattttgaattccaatcacgcataaaaatatcttccaattgttgacgaagacctaatccatcatccggtgtaatattaatagatgctccacatgtatccgtaaagtaatttcctgtccaatttgaggtacctatataggccgttttatcggttaccatatatttggcatggtttaccctagaatacggaatgggaggatcagcatctggtacaataaatagctttacttctatatctatgtttttagattttagcatagcgatagatcttaaaaagtttctcatgataaacgaagatcgttgccagcaactaatcaatagcttaacggatacttgtctgtctatagcggatcttcttaattcatcttctatataaggccaaaacaaaattttacccgccttcgaataaataatagggataaagttcataacagatacataaacgaatttactcgcatttctaatacatgacaataaagcggttaaatcattggttctttccatagtacatagttgttgcggcgcagaagcaataaatacagagtgtggaacaccacttacgttaatactaagaggatgatctgtattataatacgacggataaaagtttttccaattatatggtagattgttaactccaagataccagtatacctcaaaaatttgagtgagatccgctgccaagttcctattattgaagatcgcaatacccaattctttgacctgagttagtgatctccaatccatgttagcgcttcctaaataaatatgtgtattatcagatatccaaaattttgtatgaagaactcctcctaggatatttgtaatatctatgtatcgtacttcaactccggccatttgtagtctttcaacatcctttaatggtttgttagatttattgacggctactctaactcttactcctcttttgggtaattgtacaatctcgtttaatattatcgtgccgaaattcgtacccacttcatccgataaactccaataaaaagatgatatatctagtgtttttgtggtattggatagaatttccctccacatgttaaatgtagacaaatatactttatcaaattgcatacctataggaatagtctctgtaatcactgcgattgtattatccggattcattttatttgttaaaaaataatcctatatcacttcactctattaaaaatccaagtttctatttctttcatgactgattttttaacttcatccgtttccttatgaagatgatgtttggcaccttcataaatttttatttctctattacaatttgcatgttgcatgaaataatatgcacctaaaacatcgctaatctcattgtttgttccctggagtatgagagtcgggggggtgttaatcttggaaattatttttctaaccttgttggtagccttcaagacctgactagcaaatccagccttaattttttcatgattgattaatgggtcgtattggtatttataaactttatccatatctctagatactgattctggacatagctttccgactggcgcatttggtgtgatggttcccataagtttggcagctagcagattcagttttgaaacagcatctgcattaactagaggagacattagaatcattgctgtaaacaagtttggattatcgtaagaggctagtatagaaattgttgctcccatggaatgacccaataagtagatttaatagttaccacgtgctgtaccaaagtcatcaatcatcattttttcaccattacttcttccatgtccaatatgatcatgtgagaatactaaaattcctaacgatgatatgttttcagctagttcgtcataacgtccagaatgtttaccagctccatgacttatgaatactaatgccttaggatatgtaataggtttccaatatttacaatatatgtaatcattgtccagattgaacatacagtttgcactcatgattcacgttatataactatcaatattaacagttcgtttgatgatcatattatttttatgttttattgataattgtaaaaacatacaattaaatcaatatagaggaaggagacggatactgtcttttgtgagatagtcatggcgactaaatcagattatgaggatgctgttttttactttgtggatgatgataaaatatgtagtcgcgactccatcatcgatctaatagatgaatatatcacgtggagaaatcatgttatagtgtttaacaaagatattaccagttgtggaagactgtacaaggaattgatgaagttcgatgatgccgctatacagtactatggtattgataaaattaatgagattgtcgaagctatgagcgaaggagaccactacatcaattttacaaaagtccatgatcaggaaagtttattcgctaccataggaatatgtgctaaaatcactgaacattggggatacaaaaagatttcagaatctagattccaatcattgggaaacattacagatctgatgaccgacgataatataaacatcttgatactttttctagaaaaaaaattgaattgatgatataggggtcttcataacgcataattattacgttagcattctatatccgtgttaaaaaaaattatcctatcatgtatttgagagttttatatgtagcaaacatgatagctgtgatgccaataagctttagatattcacgcgtgctagtgttagggatggtattatctggtggtgaaatgtccgttatataatctacaaaacaatcatcgcatatagtatgcgatagtagagtaaacatttttatcgtttctactgggttcatacatcgtctacccaattcggttatgaatgaaattgtcgccaatcttacacccaaacccttgttatccattagcatagtattaacttcgttatttatgtcataaactgtaaatgattctgtagatgccatatcatacatgatattcatgtccctattataatcattactaactttatcacaatatatgttgataatatctatatatgatctagtctttgtgggcaactgtctatacaagtcgtctaaacgttgtttactcatatagtatcgaacagccatcattacatggtcccgttccgttgatagataatcgagtatgttagtggacttgtcaaatctatataccatattttctggaagtggatatacatagtcgtgatcaacattattgctagcctcatcttctatatcctgtactataccattatctatatcatctacataatctacgatattattatacataaacatcgacaacatactattgtcaattatctaagtcctgttgatccaaacccttgatctcctctatctgtactatctagagattgtacttcttccagttctggataatatatacgttgatagattagctgggctattctatcccccgtatttacattaaacgtacattttccattattaataagaataactcctatgtttcccctataatcttcgtctattacaccgcctcctatatcaatgccttttagggacagaccagacctaggagctattctaccatagcagaacttaggcatggacatactaatatctgtcttaattaactgtcgttctccaggagggatagtataatcgtaagcgctatataaatcatatccggcggcgtaaggtgattgcctagtaggagatttagctctgttagtttccttaacaaatctaactggtgagttaatattcatgttgaacataaaactaatattttatttcaaaattatttaccatcccatatattccatgaataagtgtgatgattgtacacttctatagtatctatatacgattcacgataaaatcctcctatcaatagcagtttattatccactatgatcaattctggattatccctcggataaataggatcatctatcagagtccatgtattgctggattcacaataaaattccgcatttctaccaaccaagaataaccttctaccgaacactaacgcgcatgatttataatgaggataataagtggatggtccaaactgccactgatcatgattgggtagcaaatattctgtagttgtatcagtttcagaatgtcctcccattacgtatataacattgtttatagatgccactgctggattacatctaggtttcagaagactcggcatattaacccaagcagcatccccgtggaaccaacgctcaacagatgtgggatttggtagacctcctactacgtataatttattgttagcgggtatcccgctagcatacagtctggggctattcatcggaggaattggaatccaattgtttgatatataatttacagctatagcattgttatgtatttcattgttcatccatccaccgatgagatatactacttctccaacatgagtacttgtacacatatggaatatatctataatttgatccatgttcataggatactctatgaatggatacttgtatgatttgcgtggttgtttatcacaatgaaatattttggtacagtctagtatccattttacattatttatacctctgggagaaagataatttgacctgattacatttttgataaggagtagcagatttcctaatttatttcttcgctttatataccacttaatgacaaaatcaactacataatcctcatctggaacatttagttcatcgctttctagaataagtttcatagatagataatcaaaattgtctatgatgtcatcttccagttccaaaaagtgtttggcaataaagtttttagtatgacataagagattggatagtccgtattctatacccatcatgtaacactcgacacaatattcctttctaaaatctcgtaagataaagtttatacaagtgtagatgataaattctacagaggttaatatagaagcacgtaataaattgacgacgttatgactatctatatatacctttccagtatatgagtaaataactatagaagttaaactgtgaatgtcaaggtctagacaaacccttgtaactggatctttatttttcgtgtatttttgacgtaaatgtgtgcgaaagtaaggagataactttttcaatatcgtagaattgactattatattgccacctatagcatcaataattgttttgaatttcttagtcatagacaatgctaatatattcttacagtacacagtattaacaaatatcggcatttatgtttctttaaaagtcaacatctagagaaaaatgattatctttttgagacataactcccattttttggtattcacccacacgtttttcgaaaaaattagtttttccttccaatgatatattttccatgaaatcaaacggattggtaacattataaatttttttaaatcccaattcagaaatcaatctatccgcgacgaattctatatatgttttcatcatttcacaattcattcctataagtttaactggaagagccgcagtaagaaattcttgttcaatggatactgcatctgttataatagatctaacggtttcttcactcggtggatacaataaatgtttaaacatcaaacatgcgaagtcgcagtgtagaccctcgtctctactaattagttcgttggaaaacgtgagtccgggcattaggccacgctttttaagccaaaatatggaagcgaatgatccggaaaagaagattccttctactgcagcaaaggcaataagtctctctccataaccggcgctgtcatgtatccacttttgagcccaatcggccttcttttttacacaaggcattgtttctatggcattaaagagatagtttttttcattactatctttaacataagtatcgatcaaaagactatacatttccgaatgaatgttttcaatggccatctgaaatccgtagaaacatctagcctcggtaatctgtacttctgtacaaaatcgttccgccaaattttcattcactattccgtcactggctgcaaaaaacgccaatacatgttttataaaatatttttcgtctggtgttagtttattccaatcattgatatctttagatatatctacttcttccactgtccaaaatgatgcctctgcctttttatacatgttccagatgtcatgatattggattgggaaaataacaaatctatttggatttggtgcaaggatgggttccataactaaattaacaatatcaataaattttttttcagttatctatatgcctgtacttggattttttgtacatcgatatcgccgcaatcactacaataattacaagtattattgatagcattgttattagtactatcataattaaattatcgacattcatgggtgctgaataatcgttattatcatcattatcattttgtaattgtgacatcatactaaataaatcgtttgcgagattgttgtgggaagcgggcatggaggatgcattatcattattatttaacgccttccatttggattcacaaatatggcgcgcgttcaacattttatggaaactataattttgtgaaaacagataacaagaaaactcgtcatcgttcaaatttttaacgatagtaaaccgattaaacgtcgagctaatttctaacgctagcgactctgttggatatgggtttccagatatatatcttttcagttcccctacgtatctataatcatctgtaggaaatggaagatatttccatttatctactgttcctaatatcatatgtggtggtgtagtagaaccattaagcgcgaaagatgttatttcgcatcgtattttaacttcgcaataatttctggttagataacgcactctaccagtcaagtcaatgatattagcctttacagatatattcatagtagtcgtaacgatgactccatcttttagatgcgatactcctttgtatgtaccagaatcttcgtacctcaaactcgatatatttaaacaagttaatgagatattaacgcgttttatgaatgatgatatataaccagaagttttatcctcggtggctagcgctataaccttatcattataataccaactagtgtgattaatatgtgacacgtcagtgtgggtacaaatatgtacattatcgtctacgtcgtattcgatacatccgcatacagccaacaaatataaaatgacaaatactctaacgccgttcgtacccatcttgatgcggtttaataaatgttttgatttcaatttattgtaaaaaaagattcggttttatactgttcgatattctcattgcttatattctcatctatcatctccacacagtcaaatccgtggttagcatgcacctcatcaaccggtaaaagactatcggactcttctatcattataactctagaatatttaatttggtcattattaatcaagtcaattatcttatttttaacaaacgtgagtattttactcattttttataaaaacttttagaaatatacagactctatcgtgtgtctatatcttctttttatatccaatgtatttatgtctgatttttcttcatttatcatatataatggtccaaattctacacgtgcttcggattcatccagatcattaaggttcttataattgtaacatccttctcttccctcttctacatcttccttcttattcttattcttagcgtcacagaatctaccacagcaggatcccatgacgagcgtcatattaaactaatccattttcaattataatatatgattagtaatgaccattaaaataaaaaatattcttcataaccggcaagaaagtgaaaagttcacattgaaactatgtcagtagtatacatcatgaaatgatgatatatatatactctattttggtggaggattatatgatataattcgtggataatcattcttaagacacatttcttcattcgtaaatcttttcacgttaaatgagtgtccatattttgcaatttcttcatatgatggcggtgtacgtggacgaggctgctcctgttcttgttgtggtcgccgactgtcgtgtttgcgtttatccctccattatcgcgattgcgtagatggagtactattatataccttgtaattaaatttttttattaattaaacgtataaaaacgttccgtatctgtatttaagagccagatttcgtctaatagaacaaatagctacagtaaaaataactagaataattgctacacccactagaaaccacggatcgtaatacggcaatcggttttcgataataggtggaacgtatattttatttaaggacttaacaattgtctgtaaaccacaatttgcttccgcggatcctgtattaactatctgtaaaagcatatgttggccgggcggagccgaacattctccgatatccaatttctgtatatctataatattattaacctccgcatacgcattacagttcttttctagcttggataccgcactaggtacatcgtctagatctattcctatttcctcagcgatagctcttctatccttttccggaagcaatgaaatcacttcaataaatgattcaaccatgagtgtgaaactaagtcgagaattactcatgcatttgttagttattcggagcgcgcaatttttaaactgtcctataacctctcctatatgaatagcacaagtgacattagtagggatagaatgttgagctaatttttgtaaataactatctataaaaagattatacaaagttttaaactctttagtttccgccatttatccagtctgagaaaatgtctctcataataaatttttccaagaaactaattgggtgaagaatggaaacctttaatctatatttatcacagtctgttttggtacacatgatgaattcttctaatgccgtactaaattcgatatctttttcgatttctggatatgtttttaataaagtatgaacaaagaaatggaaatcgtaataccagttatgtttaactttgaaattgttttttattttcttgttaatgattccagccacttgggaaaagtcaaagtcgtttaatgccgatttaatacgttcattaaaaacaaactttttatcctttagatgaattattattggttcattggaatcaaaaagtaagatattatcgggtttaagatctgcgtgtaaaaagttgtcgcagcatggtagttcgtagattttaatgtataacagagccatctgtaaaaagataaactttatgtattgtaccaaagatttaaatcctaatttgatagctaactcggtatctactttatctgccgaatacagtgctaggggaaaaattataatgtttcctctttcgtattcgtagttagttctcttttcatgttcgaaaaagtgaaacatgcggttaaaatagtttataacattaatattactgttaataactgccgggtaaaagtgggatagtaatttcacgaatttgatactgtcctttctctcgttaaacgcctttagaaaaactttagaagaatatctcaatgatagttcctgaccatccatagtttgtatcaataatagcaacatatgaagaacacgtttatacagagtatgtaaaaatgttaatttatagtttaatcccatggcccacgcacacacgattaattttttttcatctccctttagattgttgtatagaaatttgggtactgtgaactccgccgtagtttccatgggactatataattttgtggcctcgaatacaaattttactacatagttatctatcttaaaaactataccatatcctcctgtagatatgtgataaaaatcgtcgtttataggataaaatcgtttatccttttgttggaaaaaggatgaattaatgtaatcattctcttctatctttagtagtgtttccttattaaaattcttaaaataatttaacaatctaactgacggagcccaattttggtgtaaatctaattgggacattatattgttaaaatacaaacagtctcctaatataacagtatctgataatctatggggagacatccattgatattcaggggatgaatcattggcaacacccatttattgtacaaaaagccccaatttacaaacgaaagtccaggtttgatagagacaaactattaactattttgtctctgtttttaacacctccacagtttttaatttctttagtaatgaaattattcacaatatcagtatcttctttatctaccagagattttactaacttgataaccttggctgtctcattcaatagggtagtaatatttgtatgtgtgatattgatatctttttgaattgtttcttttagaagtgattctttgatggtgccagcatacgaattacaataatgcagaaactcggttaacatgcaggaattatagtaagccaattccaattgttgcctgtgttgtattagagtgtcaatatgagcaatggtgtccttgcgtttctctgatagaatgcgagcagcgattttggcgttatcatttgacgatatttctggaatgacgaatcctgtttctactaactttttggtaggacaaagtgaaacaatcaagaagatagcttctcctcctatttgtggaagaaattgaactcctctagatgatctactgacgatagtatctccttgacagatattggaccgaattacagaagtacctggaatgtaaagccctgaaaccccctcattttttaagcagattgttgccgtaaatcctgcactgtgaccaagatagagagctcctttggtgaatccatctctatgtttcagtttaaccaagaaacagtcagctggtctaaaatttccatctctatctaatacagcatctaacttgatgtcaggaactatgaccggtttaatgttatatgtaacattgagtaaatccttaagttcataatcatcactgtcatcagttatgtacgatccaaacaatgtttctactggcatagtggatacgaagatgctatccatcagaatgtttccctgattagtattttctatatagctattcttctttaaacgattttccaaatcagtaactatgttcatttttttaggagtaggacgcctagccagtatggaagaggattttctagatcctctcttcaacatctttgatctcaatggaatgcaaaaccccatagtgaaacaaccaacgataaaaataatattgtttttcactttttataattttaccatctgactcatggattcattaatatctttataagagctactaacgtataattctttataactgaactgagatatatacaccggatctatggtttccataattgagtaaatgaatgctcggcaataactaatggcaaatgtataaaacaacgaaattatactagagttgttaaagttaatattttctatgagctgttccaataaattatttgttgtgactgcgttcaagtcataaatcatcttgatactatccagtaaacagtctttaagttctggaatattatcatcccattgtaaagcccctaattcgactatcgaatatcctgctctgatagcagtttcaatatcgacggacgtcaatactgtaataaaggtggtagtattgtcatcatcgtgataaactacgggaatatggtcgttagtaggtacggtgactttacacaacgcgatatataactttccttttgtaccatttttaacgtagttgggacgtcctgcagggtattgttttgaagaaatgatatcgagaacagatttgatacgatatttgttggattcctgattattcactataatataatctagacagatagatgattcgataaatagagaaggtatatcgttggtaggataatacatccccattccagtattctcggatactctattgatgacactagttaagaacatgtcttctattctagaaaacgaaaacatcctacatggactcattaaaacttctaacgctcctgattgtgtctcgaatgcctcgtacaaggatttcaaggatgccatagattctttgaccaacgatttagaattgcgtttagcatctgatttttttattaaatcgaatggtcggctctctggtttgctaccccaatgataacaatagtcttgtaaagataaaccgcaagaaaatttatacgcatccatccaaataaccctagcaccatcggatgatattaatgtattattatagattttccatccacaattattgggccagtatactgttagcaacggtatatcgaatagattactcatgtaacctactagaatgatagttcgtgtactagtcataatatctttaatccaatctaagaaatttaaaattagattttttacactgttaaagttaacaaaggtattacccggatacgtggatatcatatatggcattggtccattatcagtaatagctccataaactgatacggcgatggtttttatatgtgtttgatctaacgaggaagaaattcgcgcccacaattcatctctagatatgtatttaatatcaaacggtaacacatcaatttcgggacgcgtatatgtttctaaatttttaatccaaatataatgatgacctatatgccctattatcatactgtcaactatagtacacctagagaacttacgatacatctgtttcctataatcgttaaattttacaaatctataacatgctaaaccttttgacgacaaccattcattaatttctgatatggaatctgtattctcgataccgtattgttctaaagccagtgctatatctccctgttcgtgggaacgctttcgtataatatcgatcaacggataatctgaagtttttggagaataatatgactcatgatctatttcgtccataaacaatctagacataggaattggaggcgatgatcttaattttgtgcaatgagtcgtcaatcctataacttctaatattgtaatattcatcatcgacataacactatctatgttatcatcgtatattagtataccacggccttcttcatttcgtgccaaaataatatacagtcttaaataattacgcaatatctcaatagtttcataattgttagctgttttcatcaaggtttgtatcctgtttaacatgatggcgttctataacgtctctattttctatttttaattttttaaatttttaacgatttactgtggctagatacccaatctctctcaaatatttttttagcctcgcttacaagctgtttatctatactattaaaactgacgaatccgtgattttggtaatgggttccgtcgaaatttgccgaagtgatatgaacatattcgtcgtcgactatcaacaattttgtattattctgaatagtgaaaaccttcacagatagatcattttgaacacacaacgcgtctagacttctggcggttgccatagaatatacgtcgttcttatcccaattaccaactagaagtctgatcttaactcctctattaatggctgcttctataatggagttgtaaatgtcaggccaatagtagctattaccgtcgacacgtgtagtgggaactatggccaaatgttcaatatctatactagtcttagccgacttgagtttatcaataactacatcagtgtctagatctctagaatatcccaataggtgttctggagaatcagtaaagaacactccacctataggattcttaatatgatacgcagtgctaactggcagacaacaagccgcagagcataaattcaaccatgaattttttgcgctattaaaggctttaaaagtatcaaatcttctacgaagatctgtggccagcgggggataatcagaatatacacctaacgttttaatcgtatgtatagatcctccagtaaatgacgcgtttcctacataacatctttcatcatctgacacccaaaaacaaccgagtagtagtcccacattattttttttatctatattaacggttataaaatttatatccgggcagtgactttgtagctctcccagatttcttttccctcgttcatctagcaaaactattattttaatccctttttcagatgcctcttttagtttatcaaaaataagcgcgcccctagtcgtactcagaggattacaacaaaaagatgctatgtatatatatttcttagctagagtgataatttcgttaaaacattcaaatgttgttaaatgatcggatctaaaatccatattttctggtagtgtttctaccagcctacattttgctcccgcaggtaccggtgcaaatggccacatttagttaacataaaaacttatacatcctgttctatcaacgattctagaatatcatcggctatatcgctaaaattttcatcaaagtcgacatcacaacctaactcagtcaatatattaagaagttccatgatgtcatcttcgtttatttctatatccgtatccattgtagattgttgaccgattatcgagtttaaatcattactaatactcaatccttcagaatacaatctgtgtttcattgtaaatttataggcggtgtatttaagttggtagattttcaattatgtatcaatatagcaacagtagttcttgctcctccttgattctagcatcctcttcattattttcttctacgtacataagcatgtccaatacgttagacaacacaccgacgatggcggccgccacagacacgaatatgactagaccgatgaccatttaaaaacccctctctagctttcacttaaactgtatcgattattcttttagaacatgtataatataaaaacattattctatttcgaatttaggcttccaaaaatttttcatccgtaaaccgataataatatatatagacttgttaatagtcggaataaatagattaatgcttaaactatcatcatctccacgattagagatacaatatttacattctttttgctgtttcgaaactttatcaatacacgttaatacaaacccaggaaggagatattgaaactgaggctgttgaaaatgaaacggtgaatacaataattcagataatgtaaaatcatgattccgtattctgatgatattagaactgctaatggatgtcgatggtatgtatctaggagtatctattttaacaaagcatcgatttgctaatatacaattatcattttgattaattgttattttattcatattcttaaaaggtttcatatttatcaattcttctacattaaaaatttccatttttaatttatgtagccccgcaatactcctcattacgtttcattttttgtctataatatccattttgttcatctcggtacatagattatccaattgagaagcgcatttagtagttttgtacattttaagtttattgacgaatcgtcgaaaactagttatagttaacattttattatttgataccctgatattaatacccctgccgttactattatttataactgatgtaacccacgtaacattagaattaattatcgatagtaatgcatcgacgcttccaaaattgtctattataaactcaccgataatttttttattgcatgttttcatattcattaggattatcaaatctttaatcttattacgattgtatgcgttgatattacaagacgtcattctaaaagacggaggatctccatcaaatgccagacaatcacgtacaaagtacatggaaataggttttgttctattgcgcatcatagattcatatagaacacccatagaaatactaatttgttttactctataaaatactaatgcatctatttcatcgttttgtataacgtctttccaagtgccaaattccaaatttttttcattgatagtaccaaattcttctatctctttaactacttgcatagataggtaattacagtgatgcctacatgccgttttttgaaactgaatagatgcgtctagaagcgatgctacactagtcacaatcaccactttcatatttagaatatatgtatgtaaaaatatagtagaatttcattttgtttttttctatgctataaatgaattctcattttgcatctgctcatactccgttttatatcaataccaaagaaggaagatatctggttctaaaagccgttaaagtatgcgatgttagaactgtagaatgcgaaggaagtaaagcttcctgcgtactcaaagtagataaaccctcatcgcccgcgtgtgagagaagaccttcgtccccgtccagatgcgagagaatgaataaccctggaaaacaagtcccgtttatgaggacggacatgctacaaaatatgttcgcggctaatcgcgataatgtagcttctagacttttgtcctaaaatactattatatccttttcgatattaataaatccgtgtcgtccaggttttttatctctttcagtatgtgaatagataggtattttatctctattcatcatcgaatttaagagatccgataaacattgtttgtattctccagatgtcagcatctgatacaacaatatatgtgcacataaacctctggcacttatttcatgtaccttccccttatcactaaggagaatagtatttgagaaatatgtatacatgatattatcatgaattagatatacagaatttgtaacactctcgaaatcacacgatgtgtcggcgttaagatctaatatatcactcgataacacattttcatctagatacactagacattttttaaagctaaaatagtctttagtagtgacagtaactatgcgattattttcatcgatgatacatttcatcggcatattattacgcttaccatcaaagactataccatgtgtatatctaacgtattctagcatggttgccatacgtgcattaaacttttcaggatctttggatagatcttccaatctatctatttgagaaaacatttttatcatgttcaatagttgaaacgtcggatccactatatagatattatctataaagattttaggaactacgttcatggtatcctggcgaatattaaaactatcaatgatatgattatcgttttcatcttttatcaccatatagtttctaagatatgggattttacttaatataatattatttcccgtgataaattttattagaaaggccaaatctataagaaaagtcctagaattagtctgaagaatatctatatcgccgtaccgtatatttggattaattagatatagagaatatgatccgtaacatatacaacttttattatggcgtctaagatattcttccatcaacttattaacatttttgactagggaagatacattatgacgtcccattacttttgccttgtctattactgcgacgttcatagaatttagcatatctcttgccaattcttccattgatgttacattataagaaattttagatgaaattacatttggagctttaatagtaagaactcctaatatgtccgtgtatgtggtcactaatacagattgtagttctataatcgtaaataatttacctatattatatgtttgagtctgtttagaaaagtagctaagtatacgatcttttatttctgatgcagatgtatcaacatcggaaaaaaatctttttttattcttttttactaaagatacaaatatgtctttgttaaaaacagttattttctgaatatttctagcttgtaattttaacatatgatattcgttcacactaggtactctgcctaaataggtttctataatctttaatgtaatattaggaagagtattctgatcaggattcctattcattttgaggatttaaaactctgattattgtctaatatggtctcaacacaaactttttcacagagcgatagagtttttgataactcgtttttcttaagaaatataaaactactgtttccagagctcgctctatcttttattttatctaattcgatacaaactcctgatactggttcagaaagtaattcattaattttcagtcctttatagaagatatttaatatagataatacaaaattttcagttcttgatatcgatctgattgatcctagaactagatatattaataacgtgctcattaggcagtttatggcagcttgataattagatatagtatattccagttcatatttattagataccgcattgcccagattttgatattctatgaattcctctgaaaataaatccaaaataactagacattctattttttgtggattagtgtactctcttccctctatcatgttcactactggtgtccacgatgataaatatctagagggaatataatatagtccataggatgccaatctagcaatgtcgaataactgtaatttgattcttcgttcttcattatgaattgattcttgaggtataaacctaacacaaattatattattagacttttcgtatgtaatgtctttcatgttataagtttttaatcctggaatagaatctattttaatgaggcttttaaacgcagagttctccaacgagtcaaagcataatactctgttgtttttcttatatacgatgttacgattttcttctttgaatggaataggtttttgaattagtttataattacaacataatagataaggaagtgtgcaaatagtacgcggaaaaaacataatagctcccctgttttcatccatggttttaagtaaatgatcactggcttctttagtcaatggatattcgaacattaaccgtttcatcatcattggacagaatccatatttcttaatgtaaagagtgatcaaatcattgtgtttattgtaccatcttgttgtaaatgtgtattcggttatcggatctgctcctttttctattaaagtatcgatgtcgatctcgtctaagaattcaactatatcgacatatttcatttgtatacacataaccattactaacgtagaatgtataggaagagatgtaacgggaacagggtttgttgattcgcaaactattctaatacataattcttctgttaatacgtcttgcacgtaatctattatagatgccaagatatctatataattattttgtaagatgatgttaactatgtgatctatataagtagtgtaataattcatgtatttcgatatatgttccaactctgtctttgtgatgtctagtttcgtaatatctatagcatcctcaaaaaatatattcgcatatattcccaagtcttcagttctatcttctaaaaaatcttcaacgtatggaatataataatctattttacctcttctgatatcattaatgatatagtttttgacactatcttctgtcaattgattcttattcactatatctaagaaacggatagcgtccctaggacgaactactgccattaatatctctattatagcttctggacataattcatctattataccagaattaatgggaactattccgtatctatctaacatagttttaagaaagtcagaatctaagacctgatgttcatatattggttcatacatgaaatgatctctattgatgatagtgactatttcattctctgaaaattggtaactcattctatatatgctttccttgttgatgaaggatagaatatactcaatagaatttgtaccaacaaactgttctcttatgaatcgtatatcatcatctgaaataatcatgtaaggcatacatttaacaattagagacttgtctcctgttatcaatatactattcttgtgataatttatgtgtgaggcaaatttgtccacgttctttaattttgttatagtagatatcaaatccaatggagctacagttcttggcttaaacagatatagtttttctggaacgaattctacaacattattataaaggactttgggtagataagtgggatgaaatcctattttaattaatgcgatagccttgtcctcgtgcagatatccaaacgcttttgtgatagtatggcattcattgtctagaaacgctctacgaatatctgtgacagatatcatctttagagaatatactagtcgcgttaatagtactacaatttgtattttttaatctatctcaataaaaaaattaatatgtatgattcaatgtataactaaactactaactgttattgataactagaatcagaatctaatgatgacgtaaccaagaagtttatctactgccaatttagctgcattatttttagcatctcgtttagattttccatctgccttatcgaatactcttccgtcgatgtctacacaggcataaaatgtaggagagttactaggccccactgattcaatacgaaaagaccaatctctcctagtaatttggcagtactcattaataacggtgacagggttagcacctttccaatcaataatttttttagccggaataacatcatcaaaagacttatgatcctctctcattgatttttcgcgggatacatcatctattatggcgtcagccataacatcagcatccggcttatccgcctccgttgtcataaaccaacgaggaggaatatcgtcggagctgtacaccatagcactacgttgaagatcgtacagagctttattaacttctcgcttctccatattaagttgtctagttagttgtgcagcagtagctccttcgattccaatggttttaatagcctcacacacaatctctgcgttagaacgttcgtcgatatagattttagacatttttagagagaactaacacaaccagcaataaaactgaacctactttatcatttttttattcatcatcctctggtggttcgtcgttcctatcgaatgtggatctgattaacccgtcatctataggtgatgctggttctggagattctggaggagatggattattatctggaagaatctctgttatttccttgttttcatgtatcgattgcgttgtaacattaagattgcgaaatgctctaaatttgggaggcttaaagtgttgtttgcaatctctacacgcatgtctaactagtggaggttcgtcagcggctctagtttgaatcatcatcggcgtagtattcctacttttacagttaggacacggtgtattgtatttctcgtcgagaacgttaaaataatcgttgtaactcacatcctttattttatctatattgtattctactcctttcttaatgcattttataccgaataagagatagcgaaggaattctttttcggtgccgctagtacccttaatcatatcacatagtgttttatattccaaatttgtggcaatagacggtttatttctatacgatagtttgtttctggaatcctttgagtattctataccaatattattctttgattcgaatttagtttcttcgatattagattttgtattacctatattcttgatgtagtactttgatgatttttccatggcccattctattaagtcttccaagttggcatcatccacatattgtgatagtaattctcggatatcagtagcggctaccgccattgatgtttgttcattggatgagtaactactaatgtatacattttccatttataacacttatgtattaactttgttcatttatattttttcattattatgttgatattaacaaaagtgaatatatatgttaataattgtattgtggttatacggctacaatttcataatgagtggaagtcagtgtccgatgatcaatgacgatagctttactctgaaaagaaagtatcaaatcgatagtgcggagtcaacaataaaaatggataagaagaggataaagtttcagaatagagccaaaatggtaaaagaaataaatcagacaataagagcagcacaaactcattacgagacattgaaactaggatacataaaatttaagagaatgattaggactactactctagaagatatagcaccatctattccaaataatcagaaaacttataaactattctcggacatttcagccatcggcaaagcatcacagaatccgagtaagatggtatatgctctgctgctttacatgtttcccaatttgtttggagatgaccatagattcattcgttatagaatgcatccaatgagtaaaatcaaacacaagatcttctctcctttcaaacttaatcttattagaatattagtggaagaaagattctataataatgaatgcagatctaataaatggagaataattggaacacaagttgataaaatgttgatagctgaatctgataaatatacaatagatgcaaggtataacctaaaacccatgtatagaatcaagggaaaatctgaagaagataccctcttcatcaaacagatggtagaacaatgtgtgacatcccaggaattggtggaaaaagtgttgaagatactgtttagagatttgttcaagagtggagaatacaaagcatacagatacgatgatgatgtagaaaatggatttattggattggatacactaaaattaaacattgttcatgatatagttgaaccatgtatgcctgttcgtaggccagtggctaagatactgtgtaaagaaatggtaaataaatactttgagaatccgctacatattattggtaaaaatcttcaagagtgcattgactttgttagtgaataggcatttcatctttctccaatactaattcaaattgttaaattaataatggatagtataaatagttattagtgataaaatagtaaaaataattattagaataagagtgtagtatcatagataactctcttctataaaaatggattttattcgtagaaagtatcttatatacacagtagaaaataatatagattttttaaaggatgatacattaagtaaagtaaacaattttaccctcaatcatgtactagctctcaagtatctagttagcaattttcctcaacacgttattactaaggatgtattagctaataccaatttttttgttttcatacatatggtacgatgttgtaaagtgtacgaagcggttttacgacacgcatttgatgcacccacgttgtacgttaaagcattgactaagaattatttatcgtttagtaacgcaatacaatcgtacaaggaaaccgtgcataaactaacacaagatgaaaaatttttagaggttgccgaatacatggacgaattaggagaacttataggcgtaaattatgacttagttcttaatccattatttcacggaggggaacccatcaaagatatggaaatcatttttttaaaactgtttaagaaaacagacttcaaagttgttaaaaaattaagtgttataagattacttatttgggcatacctaagcaagaaagatacaggcatagagtttgcggataatgatagacaagatatatatactctatttcaacaaactggtagaatcgtccatagcaatctaacagaaacgtttagagattatatctttcccggagataagactagctattgggtgtggttaaacgaaagtatagctaatgatgcggatatcgttcttaatagacacgccattaccatgtatgataaaattcttagttatatatactctgagataaaacaaggacgcgttaataaaaacatgcttaagttagtttatatctttgagcctgaaaaagatatcagagaacttctgctagaaatcatatatgatattcctggagatatcctatctattattgatgcaaaaaacgacgattggaaaaaatattttattagtttttataaagctaattttattaacggtaatacatttattagtgatagaacgtttaacgaggacttattcagagttgttgttcaaatagatcccgaatatttcgataatgaacgaattatgtctttattctctacgagtgctgcggacattaaacgatttgatgagttagatattaataacagttatatatctaatataatttatgaggtgaacgatatcacattagatacaatggatgatatgaagaagtgtcaaatctttaacgaggatacgtcgtattatgttaaggaatacaatacatacctgtttttgcacgagtcggatcccatggtcatagagaacggaatactaaagaaactgtcatctataaaatccaagagtagacggctgaacttgtttagcaaaaacattttaaaatattatttagacggacaattggctcgtctaggtcttgtgttagatgattataaaggagacttgttagttaaaatgataaaccatcttaagtctgtggaggatgtatccgcattcgttcgattttctacagataaaaaccctagtattcttccatcgctaatcaaaactattttagctagttataatatttccatcatcgtcttatttcaaaggtttttgagagataatctatatcatgtagaagaattcttggataaaagcatccatctaaccaagacggataagaaatatatacttcaattgataagacacggtagatcatagaacagaccaaatatattattaataatttgtatatacatagatataattatcacatattaaaaattcacacatttttgataaatgggaactgctgcaacaattcagactcccaccaaattaatgaataaagaaaatgcagaaatgattttggaaaaaattgttgatcatatagttatgtatattagtgacgaatcaagtgattcagaaaataatcctgaatatattgattttcgtaacagatacgaagactatagatctctcattataaaaagtgatcacgagtttgtaaagctatgtaaaaatcatgcagagaaaagttctccagaaacgcaacaaatgattatcaaacacatatacgaacaatatcttattccagtatctgaagtactattaaaacctataatgtccatgggtgacataattacatataacggatgtaaagacaatgaatggatgctagaacaactctctaccctaaactttaacaatctccgcacatggaactcatgtagcataggcaatgtaacgcgtctgttttatacattttttagttatctgatgaaagataaactaaatatataagtataatcccattctaatactttaacctgatgtattacctgcatcttattagaatattaacctaactaaaagacataacataaaaactcattacatagttgataaaaagcggtaggatataaatattatggctgccaccgttccgcgttttgacgacgtgtacaaaaatgcacaaagaagaattctagatcaagaaacattttttagtagaggtctaagtagaccgttaatgaaaaacacatatctatttgataattacgcgtatggatggataccagaaactgcaatttggagtagtagatacgcaaacttagatgcaagtgactattatcccatttcgttgggattacttaaaaagttcgagtttctcatgtctctatataaaggtcctattccagtatacgaagaaaaagtaaatactgaattcatagccaatggatcgttctctggtagatacgtatcatatcttcgaaagttttctgctcttccaacaaacgagtttattagttttttgttactgacttccattccaatctataatatcttgttctggtttaaaaatactcagtttgatattactaaacacacattattcagatacgtctatacagataatgccaaacacctggcgttggctaggtatatgcatcaaacaggagactataagcctttgtttagtcgtctcaaagagaattatatatttaccggtcccgttccaataggtatcaaagatatagatcaccctaatcttagtagagcaagaagtccatccgattatgagacattagctaatattagtactatattgtactttaccaagtatgatccggtattaatgtttttattgttttacgtacctgggtattcaattactacaaaaattactccagccgtagaatatctaatggataaactgaatctaacaaagagcgacgtacaactgttgtaaattattttatgcttcgtaaaatgtaggttttgaaccaaacattctttcaaagaatgagatgcataaaactttattatccaatagattgactatttcggacgtcaatcgtttaaagtaaacttcgtaaaatattctttgatcactgccgagtttaaaacttctatcgataattgtctcatatgttttaatatttacaagttttttggtccatggtacattagccggacaaatatatgcaaaataatatcgttctccaagttctatagtttctggattatttttattatattcagtaaccaaatacatattagggttatctgcggatttataatttgagtgatgcattcgactcaacataaataattctagaggagacgatctactatcaaattcggatcgtaaatctgtttctaaagaacggagaatatctatacatacctgattagaattcatccgtccttcagacaacatctcagacagtctggttttgtacatcttaatcatattcttatgaaacttggaaacatctcttctagtttcactagtacctttattaattctctcaggtacagattttgaattcgacgatgccgagtatttcatcgttgtatatttcttcttcgattgcataatcagattcttatataccgcctcaaactctattttaaaattattaaacaatactctactattaatcagtcgttctaactctttcgctatttctatagacttatctacatcttgactgtctatctctgtaaacacggagtcggtatctccatacacgctacgaaaacgaaatctgtaatctataggcaacgatgttttcacaatcggattaatatctctatcgtccatataaaatggattacttaatggattggcaaaccgtaacataccgttagataactctgctccatttagtaccgattctagatacaagatcattctacgtcctatggatgtgcaactcttagccgaagcgtatgagtatagagcactatttctaaatcccatcagaccatatactgagttggctactatcttgtacgtatattgcatggaatcataaatggccttttcagttgaactggtagcctgttttaacatctttttatatctggctctctctgccaaaaatgttcttaatagtctaggaatggttccttctatcgatctatcgaaaattgctatttcagagatgaggttcggtagtctaggttcacaatgaaccgtaatatatctaggaggtggatatttctgaagcaatagctgattatttatttcttcttccaatctattggtactaacaacgacaccgactaatgtttccggagatagatttccaaagatacacacattaggatacagactgttataatcaaagattaatacattattactaaacattttttgttttggagcaaataccttaccgccttcataaggaaacttttgttttgtttctgatctaactaagatagttttagtttccaacaatagctttaacagtggacccttgatgactgtactcgctctatattcgaataccatggattgaggaagcacatatgttgacgcacccgcgtctgtttttgtttctactccataatactcccacaaatactgacacaaacaagcatcatgaatacagtatctagccatatctaaagctatgtttagattataatccttatacatctgagctaaatcaacgtcatcctttccgaaagataatttatatgtatcattaggtaaagtaggacataatagtacgactttaaatccattttcccaaatatctttacgaattactttacatataatatcctcatcaacagtcacataattacctgtggttaaaacctttgcaaatgcagcggctttgcctttcgcgtccgtagtatcgtcaccgatgaacgtcatttctctaactcctctatttaatactttacccatgcaactgaacgcgttcttggatatagaatccaatttgtacgaatccaatttttcagatttttgaatgaatgaatatagatcgaaaaatatagttccattattgttattaacgtgaaacgtagtattggccatgccgcctactcccttatgactagactgatttctctcataaatacagagatgtacagcttcctttttgtccggagatctaaagataatcttctctcctgttaataactctagacgattagtaatatatctcagatcaaagttatgtccgttaaaggtaacgacgtagtcgaacgttagttccaacaattgtttagctattcgtaacaaaactatttcagaacatagaactagttctcgttcgtaatccatttccattagtgactgtatcctcaaacatcctctatcgacggcttcttgtatttcctgttccgttaacatctcttcattaatgagcgtaaacaataatcgtttaccacttaaatcgatataacagtaacttgtatgcgagattgggttaataaatacagaaggaaacttcttatcgaagtgacactctatatctagaaataagtacgatcttgggatatcgaatctaggtatttttttagcgaaacagttacgtggatcgtcacaatgataacatccattgttaatctttgtcaaatattgctcgtccaacgagtaacatccgtctggagatatcccgttagaaatataaaaccaactaatattgagaaattcatccatggtggcattttgtatgctgcgtttctttggctcttctatcaaccacatatctgcgacggagcattttctatctttaatatctagattataacttattgtctcgtcaatgtctatagttctcatctttcccaacggcctcgcattaaatggaggaggagacaatgactgatatatttcgtccgtcactacgtaataaaagtaatgaggaaatcgtataaatacggtctcaccatttcgacatctggatttcagatataaaaatctgttttcaccgtgactttcaaaccaattaatgcaccgaacatccatttatagaatttagaaatatattttcatttaaatgaatcccaaacattggggaagagccgtatggaccattatttttatagtactttcgcaagcgggtttagacggcaacatagaagcgtgtaaacgaaaactatatactatagtcagcactcttccatgtcctgcatgtagacggcacgcgactatcgctatagaggacaataatgtcatgtctagcgatgatctgaattatatttattattttttcatcagattatttaacaatttggcatctgatcccaaatacgcgatcgatgtgacaaaggttaaccctttataaacttaacccattataaaacttatgattagtcacaactgaaataaccgcgtgattattttttggtataattctacacggcatggtttctgtaactatgaattcaacccccgttacattagtgaaatctttaacaaacagcaagggttcgtcaaagacataaaactcattgtttacaatcgaaatagaccccctatcacacttaaaataaaaaatatccttatcctttaccaccaaataaaattctgattggtcaatgtgaatgtattcacttaacagttccacaaatttatttattaactccgaggcacatacatcgtcggtattttttatggcaaactttactcttccagcatccgtttctaaaaaaatattaacgagttccatttatatcatccaatattattgaaatgacgttgatggacagatgatacaaataagaaggtacggtacctttgtccaccatctcctccaattcatgctctattttgtcattaactttaatgtatgaaaacagtacgccacatgcttccatgacagtgtgtaacactttggatacaaaatgtttgacattagtataattgttcaagactgtcaatctataatagatagtagctataatatattctatgatggtattgaagaagatgacaaccttggcatattgatcatttaacacagacatggtatcaacagatagcttgaatgaaagagaatcagtaattggaataagcgtcttctcgatagagtgtccgtataccaacatgtctgatattttgatgtattccattaaattatttagttttttctttttattttcgttaaacagcatttctgtcaacggaccccaacatcgttgaccgattaagttttgattgatttttccgtgtaatgcgtatctagtcagatcgtatagcctatccaataatccatcatctgtgcgtagatcacatcgtacactttttaattctctatagaagagcgacagacatctggagcaattacagacagcaatttctttattctctacagatgtaagatacttgaagacattcctatgatgatgcagaattttggataacacggtattgatggtatctgttaccataattcctttgatggctgatagtgtcagagcacaagatttccaatctttgacaatttttagcaccattatctttgttttgatatctatatcagacagcatggtgcgtctgacaacacagggattaagacggaaagatgaaatgattctctcaacatcttcaatggataccttgctattttttctggcattatctatatgtgcgagaatatcctctagagaatcagtatcctttttgatgatagtggatctcaatgacatgggacgtctaaaccttcttattttatcaccagattgcatggtgatttgtcttctttcttttatcataatgtaatctctaaattcatcggcaaattgtctatatctaaaatcataatatgagatgtttacctctacaaatatctgttcgtccaatgttagagtatctacatcagttttgtattccaaattaaacatggcaacggatttaattttatattcctctattaagtcctcgtcgataataacagaatgtagataatcatttaatccatcgtacatggttggaagatgcttgttgacaaaatctttaattgtcttgatgaaggtgggactatatctaacatcttgattaataaaatttataacattgtccataggatactttgtaactagttttatacacatctcttcatcggtaagtttagacagaatatcgtgaacaggtggtatattatattcatcagatatacgaagaacaatgtccaaatctatattgtttaatatattatatagatgtagcgtagctcctacaggaatatctttaactaagtcaatgatttcatcaaccgttagatctattttaaagttaatcatataggcattgatttttaaaaggtatgtagccttgactacattctcattaattaaccattccaagtcactgtgtgtaagaagattatattctatcataagcttgactacatttggtcccgataccattaaagaattcttatgatataaggaaacagcttttaggtactcatctactctacaagaattttggagagccttaacgatatcagtgacgtttattatttcaggaggaaaaaacctaacattgagaatgtcggagttaatagcttccagatacagtgattttggcaatagtccgtgtaatccataatccagtaacacgagctggtgcttgctagacaccttttcaatgtttaatttttttgaaataagctttgataaagccttcctcgcaaattccggatacatgaacatgtcggcgacatgattaagtattgttttttcattatttttatattttctcaacaagttctcaataccccaatagatgatagaatatcacccaatgcgtccatgttgtctatttccaacaggtcgctatatccaccaatagaagtttttccaaaaaagattctaggaacagttctaccaccagtaatttgttcaaaatagtcacgcaattcattttcgggtttaaattctttaatatcgacaatttcatacgctcctcttttgaaactaaacttatttagaatatccagtgcatttctacaaaaaggacatgtatacttgacaaaaattgtcactttgttattggccaacctttgttgtacaaattcctcggccattttaatatttaagtgatataaaactatctcgacttatttaactctttagtcgagatatatggacgcagatagctatatgatagccaactacagaaggcaaacgctataaaaaacataattacgacgagcatatttataaatatttttattcagcattacttgatatagtaatattaggcacagtcaaacattcaaccactctcgatacattaactctctcattttctttaacaaattctgcaatatcttcgtaaaaagattcttgaaactttttagaatatctatcgactctagatgaaatagcgttcgtcaacatactatgttttgtatacataaaggcgcccattttaacagtttctagtgacaaaatgctagcgatcctaggatcctttagaatcacatagattgacgattcgtctctcttagtaactctagtaaaataatcatacaatctagtacgcgaaataatattatccttgacttgaggagatctaaacaatctagttttgagaacatcgataagttcatcgggaatgacatacatactatctttaatagaactcttttcatccagttgaatggattcgtccttaaccaactgattaatgagatcttctattttatcattttccagatgatatgtatgtccattaaagttaaattgtgtagcgcttctttttagtctagcagccaatactttaacatcactaatatcgatatacaaaggagatgatttatctatggtattaagaattcgtttttcgacatctgtcaaaaccaattcctttttgcctgtatcatccagttttccatcctttgtaaagaaattattttctactagactattaataagactgataaggattcctccataattgcacaatccaaactttttaacaaaactagactttacaagatctacaggaatgcgtacttcaggtttcttagcttgtgattttttcttttgtggacattttcttgtgaccaactcatctaccatttcattgattttagcagtgaaataagctttcaatgcacgggcactgatactattgaaaacgagttgatcttcaaattccgccatttaagttcaccaaacaacttttaaatacaaatatatcaatagtagtagaataagaactataaaaaaaataataattaaccaataccaaccccaacaaccggtattattagttgatgtgactgttttctcatcacttagaacagatttaacaatttctataaagtctgtcaaatcatcttccggagaccccataaatacaccaaatatagcggcgtacaacttatccatttatacattgaatattggcttttctttatcgctatcttcatcatattcatcatcaatatcaacaagtcccagattacgagccagatcttcttctacattttcagtcattgatacacgttcactatctccagagagtccgataacgttagccaccacttctctatcaatgattagtttcttgagtgcgaatgtaatttttgtttccgttccggatctatagaaaactacaggtgtgataattgccttggccaattgtctttctcttttactgagtgattctagttcaccttctatagatctgagaatggatgattctccagtcgaaacatattctaccatggatccgtttaatttgttgatgaagatggattcatccttaaatgttttctctgtaatagtttccaccgaaagactatgcaaagaatttggaatgcgttccttgtgcttaatgtttccatagacggcttctagaagttgatacaacataggactagccgcggtaacttttatttttagaaagtatccatcgcttctatcttgtttagatttatttttataaagtttagtctctccttccaacataataaaagtggaagtcatttgactagataaactatcagtaagttttatagagatagacgaacaattagcgtattgagaagcatttagtgtaacgtattcgatacattttgcattagatttactaatcgattttgcatactctataacacccgcacaagtctgtagagaatcgctagatgcagtaggtcttggtgaagtttcaactctcttcttgattaccttactcatgattaaacctaaataattgtactttgtaatataatgatatatattttcactttatctcatttgagaataaaaatgtttttgtttaaccactgcatgatgtacagatttcggaatcgcaaaccaccagtggttttattttatccttgtccaatgtgaattgaatgggagcggatgcgggtttcgtacgtagatagtacattcccgtttttagaccgagactccatccgtaaaaatgcatactcgttagtttggaataactcggatctgctatatggatattcatagattgactttgatcgatgaaggctcccctgtctgcagccatttttatgatcgtcttttgtggaatttcccaaatagttttataaactcgcttaatatcttctggaaggtttgtattctgaatggatccaccatctgccataatcctattcttgatctcatcattccataattttctctcggttaaaactctaaggagatgcggattaactacttgaaattctccagacaatactctccgagtgtaaatattactggtatacggttccaccgactcattatttcccaaaatttgagcagttgatgcagtcggcataggtgccaccaataaactatttctaagaccgtatgttctgattttatcttttagaggttcccaattccaaagatccgacggtacaacattccaaagatcatattgtagaataccgttactggcgtacgatcctacatatgtatcgtatggtccttccttctcagctagttcacaactcgcctctaatgcaccgtaataaatggtttcgaagatcttcttatttagatcttgtgcttccaggctatcaaatggataatttaagagaataaacgcgtccgctaatccttgaacaccaataccgataggtctatgtctcttattagagatttcagcttctggaataggataataattaatatctataattttattgagatttctgacaattactttgaccacatccttcagtttgagaaaatcaaatcgcccatctattacaaacatgttcaaggcaacagatgccagattacaaacggctacctcattagcatccgcatattgtattatctcagtgcaaagattactacacttgatagttcctaaattttgttgattactctttttgttacacgcatccttataaagaatgaatggagtaccagtttcaatctgagattctataatcgctttccagacgactcgagcctttattatagatttgtatctcctttctctttcgtatagtgtatacaatcgttcgaactcgtctccccaaacattgtccaatccaggacattcatccggacacatcaacgaccactctccgtcatccttcactcgtttcataaagagatcaggaatccaaagagctataaatagatctctggttctatgttcctcgtttcctgtattctttttaagatcgaggaacgccataatatcagaatgccacggttccaagtatatggccataactccaggccgtttgtttcctccctgatctatgtatctagcggtgttattataaactctcaacattggaataataccgtttgatataccattggtaccggagatatagcttccactggcacgaatattactaattgatagacctattccccctgccattttagagattaatgcgcatcgttttaacgtgtcatagataccctctatgctatcatcgatcatgttaagtagaaaacagctagacatttggtgacgactagttcccgcattaaataaggtaggagaagcgtgcgtaaaccatttttcagaaagtagattgtacgtctcaatagctgagtctatatcccattgatgaattcctactgcgacacgcattaacatgtgctgaggtctttcaacgatcttgttgtttattttcaacaagtaggatttttccaaagttttaaaaccaaaatagttgtatgaaaagtctcgttcgtaaataataaccgagttgagtttatccttatatttgttaactatatccatggtgatacttgaaataatcggagaatgtttcccatttttaggattaacatagttgaataaatcctccatcacttcactaaatagtttttttgtttccttgtgtagatttgatacggctattctggcggctagaatggcataatccggatgttgtgtagtacaagtggctgctatttcggctgccagagtgtccaattctaccgttgttactccattatatattccttgaataaccttcatagctattttaataggatctatatgatccgtgtttaagccataacataattttctaatacgagacgtgattttatcaaacatgacattttccttgtatccatttcgtttaatgacaaacatttttgttggtgtaataaaaaaattatttaacttttcattaatagggatttgacgtatgtagcgtacaaaattatcgttcctggtatatagataaagagtcctatatatttgaaaatcgttacggctcgattaaactttaatgattgcatagtgaatatatcattaggatttaactccttgactatcagggcggcaccagaaattaccatcaaaagcattaatacagttatgccgatcgcagttagaacggttatagcatccaccatttatatctaaaaattagatcaaagaatatgtgacaaagtcctagttgtatactgagaattgacgaaacaatgtttcttacatatttttttcttattagtaactgacttaatagtaggaactggaaagctagacttgattattctataagtatagatacccttccaaataatattctctttgataaaagttccagaaaatgtagaattttttaaaaagttatcttttgctattaccaagattgtgtttagacgcttattattaatatgagtgatgaaatccacaccgcctctagatatcgcttttatttccacattagatggtaaatccaatagtgaaactatctttttaggaatgtatggactcgcgtttagaggagtgaacgtcttaggcgtcggaaaggatgattcatcaaacgaataaacaatttcacaaatggatgttaatgtattagtaggaaattttttgacgctagtggaattgaagattctaatggatgatgttctacctatttcatccgataacatgttaatttccgacaccaacggttttaatatttcgatgatatacggtagtctctctttcggacttatatagcttattccacaatacgagtcattatatactccaaaaaacaaaataactagtataaaatctgtatcgaatgggaaaaacgaaattatcgacataggtatagaatctggaacattgaacgtattaatacttaattctttttctgtggtaagtaccgataggttattgacattgtatggttttaaatattctataacttgagacttgatagatattagtgatgaattgaaaattatttttatcaccacgtgtgtttcaggatcatcgtcgacgcccgtcaaccaaccgaatggagtaaaataaatatcattaatatatgctctagatattagtatttttatcaatcctttgattatcatcttctcgtaggcgaatgattccatgatcaagagtgatttaagaacatcctccggagtattaatgggcttagtaaacagtccatcgttgcaataataaaagttatccaagttaaaggatattatgcattcgtttaaagatatcacctcatctgacggagacaattttttggtaggttttagagactttgaagctacttgtttaacaaagttattcatcgtcgtttactattctatttaattttgtagttaatttatcacatatcacattaattgactttttggtccatttttccatacgtttatattcttttaatcctgcgttatccgtttccgttatatccagggatagatcttgcaagttaaatagaatgctcttaaataatgtcatttttttatccgctaaaaatttaaagaatgtataaacttttttcaaagatttaaaacttttaggtggagttctagtacacaatatcataaacaaactaataaacatcccgcattcagattccaacagctgattaacttccacattaatacagcctattttcgctccaaatgtacattcgaaaaatctgaataaaacatcgatgtcacaatttgtattatccaatacagaatgtctgtgattcgtgttaaaaccatcggagaaggaatagaaataaaaattattatagtggtggaattcagttggaatattgcctccggagtcataaaaggatactaaacattgttttttatcataaattacacatttccaatgagacaaataacaaaatccaaacattacaaatctagaggtagaacttttaattttgtctttaagtatatacgataagatatgtttattcataaacgcgtcaaatttttcatgaatcgctaaggagtttaagaatctcatgtcaaattgtcctatataatccacttcggatccataagcaaactgagagactaagttcttaatacttcgattgctcatccaggctcctctctcaggctctattttcatcttgacgacctttggattttcaccagtatgtattcctttacgtgataaatcatcgattttcaaatccatttgtgagaagtctatcgccttagatactttttcccgtagtcgaggtttaaagaaatacgctaacggtatactagtaggtaactcaaagacatcatatatagaatggtaacgcgtctttaactcgtcggttaactctttcttttgatcgagttcgtcgctactattgggtctgctcaggtgccccgactctactagttccaacatcataccgataggaatacaagacactttgccagcggttgtagatttatcatatttctccactacatatccgttacaatttgttaaaaatttagatacatctatattgctacataatccagctagtgaatatatatgacataataaattggtaaatcctagttctggtattttactaattactaaatctgtatatctttccatttatcatggaaaagaatttaccagatatcttcttttttccaaactgcgttaatgtattctcttacaaatattcacaagatgaattcagtaatatgagtaaaacggaacgtgatagtttctcattggcggtgtttccagttataaaacatagatggcataacgcacacgttgtaaaacataaaggaatatacaaagttagtacagaagcacgtggaaaaaaagtatctcctccatcactaggaaaacccgcacacataaacctaaccgcgaagcaatatatatacagtgaacacacaataagctttgaatgttatagttttctaaaatgtataacaaatacagaaatcaattcgttcgatgagtatatattaagaggactattagaagctggtaatagtttacagatattttccaattccgtaggtaaacgaacagatactataggtgtactagggaataagtatccatttagcaaaattccattggcctcattaactcctaaagcacaacgagagatattttcagcgtggatttctcatagacctgtagttttaactggaggaactggagtgggtaagacgtcacaggtacccaagttattgctttggtttaattatttatttggtggattctctactctagataaaatcactgactttcacgaaagaccagtcattctatctcttcctaggatagctttagttagattgcatagcaataccattttaaaatcattgggatttaaggtactagatggatctcctatttctttacggtacggatctataccggaagaattaataaacaaacaaccaaaaaaatatggaattgtattttctacccataagttatctctaacaaaactatttagttatggcactcttattatagacgaagttcatgagcatgatcaaataggagatattattatagcagtagcgagaaagcatcatacgaaaatagattctatgtttttaatgactgccacgttagaggatgacagggaacggctaaaagtatttttacctaatcccgcatttatacatattcctggagatacactgtttaaaattagcgaggtatttattcataataagataaatccatcttccagaatggcatacatagaagaagaaaagagaaatttagttactgctatacagatgtatactcctcctgatggatcatccggtatagtctttgtggcatccgttgcacagtgtcacgaatataaatcatatttagaaaaaagattaccgtatgatatgtatattattcatggtaaggtcttagatatagacgaaatattagaaaaagtgtattcatcacctaatgtatcgataattatttctactccttatttggaatccagcgttactatacacaatgttacacacatttatgatatgggtagagtttttgtccccgctccttttggaggatcgcaacaatttatttctaaatctatgagagatcaacgaaaaggaagagtaggaagagttaatcctggtacatacgtctatttctatgatctgtcttatatgaagtctatacagcgaatagattcagaatttctacataattatatattgtacgctaataagtttaatctaacactccccgaagatttgtttataatccctacaaatttggatattctatggcgtacaaaggaatatatagactcgttcgatattagtacagaaacatggaataaattattatccaattattatatgaagatgatagagtatgctaaactttatgtactaagtcctattctcgctgaggagttggataactttgagaggacgggagaattaactagtattgtacgagaagccattttatctctaaatttacgaattaagattttaaattttaaacataaagatgatgatacgtatatacacttttgtaaaatattattcggtgtctataacggaacaaacgctactatatattatcatagacctctaacgggatatatgaatatgatttcagatactatatttgttcctgtagataataactaaaaatcaaactctaatgaccacatctttttttagagatgaaaaattttctacatctccttttgtagacacgactaaacattttgcagaaaaaagtttattagtgtttagataatcgtatacttcatcagtgtagatagtaaatgtgaacagataaaaggtattcttgctcaatagattggtaaattccatagaatatattaatcctttcttcttgagatcccacatcatttcaaccagagacgttttatccaatgatttacctcgtactataccacatacaaaactagattttgcagtgacgtcgtacctggtattcctaccaaacaaaattttacttttagttcttttagaaaattctaaggtagaatctctatttgccaatatgtcatctatggaattaccactagcaaaaaatgatagaaatatatattgatacatcgcagctggttttgatctactatactttaaaaacgaatcagattccataattgcctgtatatcatcagctgaaaaactatgttttacacgtattccttcggcatttctttttaatgatatatcttgtttagacaatgataaagttatcatgtccatgagagacgcgtctccgtatcgtataaatatttcattagatgttagacgcttcattaggggtatacttctataaggtttcttaatcagtccatcattggttgcgtcaagaactactatcggatgttgttgggtatctctagtgttacacatggccttactaaagtttgggtaaataactatgatatctctattaattatagatgcatatatttcattcgtcaaggatattagtatcgacttgctatcgtcattaatacgtgtaatgtaatcatataaatcatgcgatagccaaggaaaatttaaatagatgttcatcatataatcgtcgctataattcatattaatacgttgacattgactaatttgtaatatagcctcgccacgaagaaagctctcgtattcagtttcatcgataaaggataccgttaaatataactggttgccgatagtctcatagtctattaagtggtaagtttcgtacaaatacagaatccctaaaatattatctaatgttggattaatctttaccataactgtataaaatggagacggagtcataactattttaccgtttgtacttactggaatagatgaaggaataatctccggacatgctggtaaagacccaaatgtctgtttgaagaaatccaatgttccaggtcctaatctcttaacaaaaattacgatattcgatcccgatatcctttgcattctatttaccagcatatcacgaactatattaagattatctatcatgtctattctcccaccgttatataaatcgcctccgctaagaaacgttagtatatccatacaatggaatacttcatttctaaaatagtattcgttttctaattctttaatgtgaaatcgtatactagaaagggaaaaattatctttgagttttccgttagaaaagaaccacgaaactaatgttctgattgcgtccgattccgttgctgaattaatggatttacaccaaaaactcatataacttctagatgtagaagcattcgctaaaaaattagtagaatcaaaggatataagtagatgttccaacaagtgagcaattcccaagatttcatctatatcattctcgaatccgaaattagaaattcccaagtagatatcctttttcatccgatcgttgatgaaaatacgaactttattcggtaagacaatcatttactaaggagtaaaataggaagtaatgttcgtatgtcgttatcatcgtataaattaaaggtgtgttttttaccattaagtgacattataattttaccaatattggaattataatataggtgtatttgcgcactcgcgacggttgatgcatcggtaaatatagctgtatctaatgttctagtcggtatttcatcatttcgctgtctaataatagcgttttctctatctgtttccattacagctgcctgaagtttattggtcggataatatgtaaaataataagaaatacatacgaataacaaaaataaaataagatataataaagatgccatttagagatctaattttgttcaacttgtccaaattcctacttacagaagatgaggaatcgttggagatagtgtcttccttatgtagaggatttgaaatatcttatgatgacttgataacttactttccagataggaaataccataaatatatttataaagtatttgaacatgtagatttatcggaggaattaagtatggaattccatgatacaactttgcgagatttagtttatcttagattgtacaagtattccaagtgtatacggccgtgttataaattaggagataatctaaaaggcatagttgttataaaggacaggaatatttatattagggaagcaaatgatgacttgatagaatatctcctcaaggaatacactcctcagatttatacatattctaatgagcgcgtccccataactggttcaaaattaattctttgtggattttctcaagttacatttatggcgtatacaacgtcgcatataacaacaaataaaaaggtagatgttctcgtttccaaaaaatgtatagatgaactagtcgatccaataaattatcaaatacttcaaaatttatttgataaaggaagcggaacaataaacaaaatactcaggaagatattttattcggtaaccggtggccaaactccataggtagctttttctatttcggattttagaatttccaaattcaccagcgatttatcggttttggtgaaatccaaggatttattaatgtccacaaatgccatttgttttgtctgtggattgtatttgaaaatggaaacgatgtagttagatagatgcgctgcgaagtttcctattagggttccgcgcttcacgtcacccagcatacttgaatcaccatcctttaaaaaaaatgataagatatcaacatggagtatatcatactcggattttaattcttctactgcatcactgacattttcacaaatactacaatacggtttaccgaaaataatcagtacgttcttcatttatgggtatcaaaaacttaaaatcgttactgctggaaaataaatcactgacgatattagatgataatttatacaaagtatacaatggaatatttgtggatacaatgagtatttatatagccgtcgccaattgtgtcagaaacttagaagagttaactacggtattcataaaatacgtaaacggatgggtaaaaaagggagggcatgtaaccctttttatcgatagaggaagtataaaaattaaacaagacgttagagacaagagacgtaaatattctaaattaaccaaggacagaaaaatgctagaattagaaaagtgtacatccgaaatacaaaatgttaccggatttatggaagaagaaataaaggcaaaaatgcaattaaaaatcgataaacttacatttcaaatatatttatctgattctgataacataaaaatatcattgaatgagatactaacacatttcaacaataatgagaatgttacattattttattgtgatgaacgagacgcagaattcgttatgtgtctcgaggctaaaacacatttctctaccacaggagaatggccgttgataataagtaccgatcaggatactatgctatttgcatctactgataatcatcctaagatgataaaaaacttaactcaactgtttaaatttgttccctcggcagaggataactatttagcaaaattaacggcgttagtgaatggatgtgatttctttcctggactctatggggcatctataacacccaccaacttaaacaaaatacaattgtttagtgattttacaatcgataatatagtcactagtttggcaattaaaaattattatagaaagactaactctaccgtagacgtgcgtaatattgttacgtttataaacgattacgctaatttagacgatgtctactcgtatgttcctccttgtcaatgcactgttcaagaatttatattttccgcattagatgaaaaatggaatgaatttaaatcatcttatttagagaccgttccgttaccctgtcaattaatgtacgcgttagaaccacgtaaggagattgatgtttcagaagttaaaactttatcatcttatatagatttcgaaaatactaaatcagatatcgatgttataaaatctatatcctcgatttttggatattctaacgaaaactgtaacacgatagtattcggcatctataaggataatttactactgagtataaataattcattttactttaacgatagtctgttaataaccaatactaaaagtgataatataataaatataggttactagattaaaaatggtgttccaactcgtgtgctctacatgcggtaaagatatttctcacgaacgatataaattgattatacgaaaaaaatcattaaaggatgtactcgtcagtgtaaagaacgaatgttgtaggttaaaattatctacacaaatagaacctcaacgtaacttaacagtgcaacctctattggatataaactaatatggatccggttaattttatcaagacatatgcgcctagaggttctattatttttattaattataccatgtcattaacaagtcatttgaatccatcgatagaaaaacatgtgggtatttattatggtacgttattatcggaacacttggtagttgaatctacctatagaaaaggagttcgaatagtcccattggatagtttttttgaaggatatcttagtgcaaaagtatacatgttagagaatattcaagttatgaaaatagcagctgatacgtcattaactttattgggtattccgtatggatttggtcatgatagaatgtattgttttaaattggtagctgactgttataaaaatgccggtgttgaaacatcgtctaaacgaatattaggtaaagatatttttctgagccaaaacttcacagacgataatagatggataaagatatatgattctaataatttaacattttggcaaattgattaccttaaagggtgagttaatatgcataactactcctccgttgttttttccctcgttctttttcttaacgttgtttgccatcactctcataatgtaaagatattctaaaatggtaaacttttgcatatcggacgcagaaattggtataaatgttgtaattgtattatttcccgtcaatggactagtcacagctccatcagttttatatcctttagagtatttctcactcgtgtctaacattctagagcattccatgatctgtttatcgttgatattggccggaaagatagattttttattttttattatattactattggcaattgtagatataacttctggtaaatatttttctaccttttcaatctcttctattttcaagccggctatatattctgctatattgttgctagtatcaataccttttcttgctaagaagtcatatgtggtattcactatatcagttttaactggtagttccattagcctttccacttctgcagaataatcagaaattggttctttaccagaaaatccagctactataataggctcaccgatgatcattggcaaaatcctatattgtaccagattaatgagagcatatttcatttccaataattctgctagttcttgagacattgatttatttgatgaatctagttggttctctagatactctaccatttctgccgcatacaataacttgttagataaaatcagggttatcaaagtgtttagcgtggctagaatagtgggcttgcatgtattaaagaatgcggtagtatgagtaaaccgttttaacgaattatatagtctccagaaatctgtggcgttacatacatgagccgaatgacatcgaagattgtccaatatttttaatagctgctctttgtccattatttctatatttgactcgcaacaattgtagataccattaatcactgattcctttttcgatgccggacaatagcacaattgtttagctttggactctatgtattcagaattaatagatatatctcttaatacagattgcactatacattttgaaactatgtcaaaaattgtagaacgacgctgttctgcagccatttaactttaaataatttacaaaaatttaaaatgagcatccgtataaaaatcgataaactgcgccaaattgtggcatatttttcagagttcagtgaagaagtgtctataaatgtagactcgacggatgagttaatgtatatttttgccgccttgggcggatctgtaaacatttgggccattatacctctcagtgcatcagtgttctaccgcggagccgaaaatattgtgtttaatcttccggtgtccaaggtaaaatcgtgtttgtgtagttttcacaatgatgccatcatagatatagaacctgatctggaaaataatctagtaaaactttctagttatcatgtagtaagtgtcgattgtaacaaggaactgatgcctattaggacagatactactatttgtctaagtatagatcaaaagaaatcttacgtgtttaattttcacaagtatgaagaaaaatgttgtggtagaaccgtcattcatttagaatggttgttgggctttatcaagtgtattagtcagcatcagcatttggctattatgtttaaagatgacaatattattatgaagactcctggtaatactgatgcgttttccagggaatattctatgactgaatgttctcaagaactacaaaagttttctttcaaaatagctatctcgtctctcaacaaactacgaggattcaaaaagagagtcaatgtttttgaaactagaatcgtaatggataatgacgataacattctaggaatgttgttttcggatagagttcaatcctttaagatcaacatctttatggcgtttttagattaatactttcaatgagataaatatgggtggcggagtaagtgttgagctccctaaacgggatccgcctccgggagtacccactgatgagatgttattaaacgtggataaaatgcatgacgtgatagctcccgctaagcttttagaatatgtgcatataggaccactagcaaaagataaagaggataaagtaaagaaaagatatccagagtttagattagtcaacacaggacccggtggtctttcggcattgttaagacaatcgtataatggaaccgcacccaattgctgtcgcacttttaatcgtactcattattggaagaaggatggaaagatatcagataagtatgaagagggtgcagtattagaatcgtgttggccagacgttcacgacactggaaaatgcgatgttgatttattcgactggtgtcagggggatacgttcgatagaaacatatgccatcagtggatcggttcagcctttaataggagtgatagaactgtagagggtcaacaatcgttaataaatctgtataataagatgcaaacattatgtagtaaagatgctagtgtaccaatatgtgaatcatttttgcatcatttacgcgcacacaatacagaagatagcaaagagatgatcgattatattctaagacaacagtctgcggactttaaacagaaatatatgagatgtagttatcccactagagataagttagaagagtcattaaaatatgcggaacctcgagaatgttgggatccagagtgttcgaatgccaatgttaatttcttactaacacgtaattataataatttaggactttgcaatattgtacgatgtaatactagcgtgaacaacttacagatggataaaacttcctcattaagattgtcatgtggattaagcaatagtgatagattttctactgttcccgtcaatagagcaaaagtagttcaacataatattaaacattcgttcgacctaaaattgcatttgatcagtttattatctctcttggtaatatggatactaattgtagctatttaaatgggtgccgcggcaagcatacagacgacggtgaatacactcagcgaacgtatctcgtctaaattagaacaagaagcgaacgctagtgctcaaacaaaatgtgatatagaaatcggaaatttttatatccgacaaaaccatggatgtaacctcactgttaaaaatatgtgctctgcggacgcggatgctcagttggatgctgtgttatcagccgctacagaaacatatagtggattaacaccggaacaaaaagcatacgtgccagctatgtttactgctgcgttaaacattcagacaagtgtaaacactgttgttagagattttgaaaattatgtgaaacagacttgtaattctagcgcggtcgtcgataacaaattaaagatacaaaacgtaatcatagatgaatgttacggagccccaggatctccaacaaatttggaatttattaatacaggatctagcaaaggaaattgtgccattaaagcgttgatgcaattgacgactaaggccactactcaaatagcacctagacaagttgctggtacaggagttcagttttatatgattgttatcggtgttataatattggcagcgttgtttatgtactatgccaagcgtatgctgttcacatccaccaatgataaaatcaaacttattttagccaataaggaaaacgtccattggactacttacatggacacattctttagaacttctccgatggttattgctaccacggatatacaaaactgaaaatatattgataatattttaatagattaacatggaagttatcgctgatcgtctagacgatatagtgaaacaaaatatagcggatgaaaaatttgtagattttgttatacacggtctagagcatcaatgtcctgctatacttcgaccattaattaggttgtttattgatatactattatttgttatagtaatttatatttttacggtacgtctagtaagtagaaattatcaaatgttgttggtggcgctagtcatcacattaactattttttattactttatactataatagtactagactgacttctaacaaacatctcacctgccataaataaatgcttgatattaaagtcttctatttctaacactattccatctgtggaaaataatactctgacattatcgctaattgacacatcggtgagtgatatgcctataaagtaataatcttctttgggcacatataccagtgtaccaggttctaacaacctatttactggtgctcctgtagcatactttttctttaccttgagaatatccatcgtttgcttggtcaatagcgatatgtgattttttatcaaccactcgaaaaagtaattggagtgttcatatcctctacgggctattgtctcatggccgtgtatgaaatttaagtaacacgactgtggtagatttgttctatagagccggttgccgcaaatagatagaactaccaatatgtctgtacaaatgttaaacattaattgattaacagaaaaaacaatgttcgttctgggaatagaaaccagatcaaaacaaaattcgttagaatatatgccacgtttatacattgaatataaaataactacagtttgaaaaataacagtatcatttaaacatttaacttgcggggttaatctcacaactttactgtttttaaactgttcaaaatatagcatcgatccatgagaaatacgtttagccgcctttaatagaggaaatcccaccgcctttctggatctcaccaacgacgatagttctgaccagcaactcatttcttcatcatccacctgttttaacatataataggcaggagatagatatccgtcattgcaatattccttctcgtaggcacacaatctaatattgataaaatctccattctcttctctgcatttattatcttgtttcggtggctgattaggctgtagtcttggtttaggctttggtatatcgttgttgaatctattttggtcattaaatctttcatttcttcctggtatatttttatcacctcgtttggttggatttttgtctatattatcgtttgtaacatcggtacgggtattcatttatcacaaaaaaaacttctctaaatgagtctactgctagaaaacctcatcgaagaagataccatattttttgcaggaagtatatctgagtatgatgatttacaaatggttattgccggcgcaaaatccaaatttccaagatctatgctttctatttttaatatagtacctagaacgatgtcaaaatatgagttggagttgattcataacgaaaatatcacaggagcaatgtttaccacaatgtataatataagaaacaatttgggtctaggagatgataaactaactattgaagccattgaaaactatttcttggatcctaacaatgaagttatgcctcttattattaataatacggatatgactgccgtcattcctaaaaaaagtggtaggagaaagaataagaacatggttattttccgtcaaggatcatcacctatcttgtgtattttcgaaactcgtaaaaagattaatatttataaagaaaatatggaatccgcatcgactgagtatacacctatcggagacaacaaggctttgatatctaaatatgcgggaattaatatcctaaatgtgtattctccttccacatccataagattgaatgccatttacggattcaccaataaaaataaactagagaaacttagtactaataaggaactagaatcgtatagttctagccctcttcaagaacccattaggttaaatgattttctgggactattggaatgtgttaaaaagaatattcctctaacagatattccgacaaaggattgattactataaatggagaatgttcctaatgtatactttaatcctgtgtttatagagcccacgtttaaacattctttattaagtgtttataaacacagattaatagttttatttgaagtattcgttgtattcattctaatatatgtattttttagatctgaattaaatatgttcttcatgcctaaacgaaaaatacccgatcctattgatagattacgacgtgctaatctagcgtgtgaagacgataaattaatgatctatggattaccatggatgacaactcaaacatctgcgttatcaataaatagtaaaccgatagtgtataaagattgtgcaaagcttttgcgatcaataaatggatcacaaccagtatctcttaacgatgttcttcgcagatgatgattcattttttaagtatttggctagtcaagatgatgaatcttcattatctgatatattgcaaatcactcaatatctagactttctgttattattattgatccaatcaaaaaataaattagaagccgtgggtcattgttatgaatctctttcagaggaatacagacaattgacaaaattcacagactttcaagattttaaaaaactgtttaacaaggtccctattgttacagatggaagggtcaaacttaataaaggatatttgttcgactttgtgattagtttgatgcgattcaaaaaagaatcctctctagctaccaccgcaatagatcctattagatacatagatcctcgtcgcgatatcgcattttctaacgtgatggatatattaaagtcgaataaagtgaacaataattaattctttattgtcatcatgaacggcggacatattcagttgataatcggccccatgttttcaggtaaaagtacagaattaattagacgagttggtaccaaaaattgaaaaactagcgtctttttttgctcgactgcagaccatggagacacccaagcctaggatactgccctggctcgtgagccagctcgatctcggccaactcgaaggtgtcgcttggttggacgagtcaaggacaagattcagaataccctggaagcatggcctgagacaggatgctcagatggccgattttggtatttttcaagcttgggccgaagcttctggtgcttacacccccggcaaggataaacctgatgtgtccacttggaaacggaatttccggtctgccttgaaccggaaggaagtgttgcgcctcgccgcagataactctaaagatccttacgaccctcacaaagtttatgagtttgttactcccggggcaagagattttgtgcatcttggggcttcacccgatactaatggaaaaagtagtcttccccacagtcaggagaatcttcccaaactttttgatgggcttattctcgggcccttgaaggatgaggggagttccgatttggcaatagtctctgacccaagccagcaactgccatcaccaaacgtcaacaattttctcaatccagccccccaagagaacccccttaaacagcttcttgccgaggagcaatgggagttcgaagttactgccttctatcgcgggaggcaggtattccaacaaaccttgttttgtccaggaggcttgagactcgtgggcagcactgctgatatgactctgccctggcagccagtgaccctccccgaccctgaagggttcctgactgacaaactcgtgaaggagtacgtgggacaagtactgaagggcctgggaaatggtcttgccctctggcaagctggacagtgcttgtgggctcaacgccttggacattcacacgcattttgggccctcggggaggagcttcttcctgacagtggccgcggaccagatggcgaggtacataaggataaagatggtgcagtcttcgacctcagaccatttgtcgcagaccttatcgccttcatggaaggttccggtcacagccctagatatacactttggttctgtatgggggaaatgtggccacaagatcaaccttgggtcaagcgccttgttatggtaaaggtggtccctacatgtttgaaagagctgctcgaaatggctcgggaaggaggagcctcttctttgaaaactgtagacctgcacatatctaacagccaaccaatcagcctgacctccgatcagtacaaagcttaccttcaagaccttgtcgaggacatggacttccaagccacaggcaacatttgattaattaatttttatgagctcggaggtaatgatatgtatcaatcggtgtgtagaaagtgttacatcgactcataatattatattttttatctaaaaaactaaaaataaacattgattaaattttaatataatacttaaaaatggatgttgtgtcgttagataaaccgtttatgtattttgaggaaattgataatgagttagattacgaaccagaaagtgcaaatgaggtcgcaaaaaaactaccgtatcaaggacagttaaaactattactaggagaattattttttcttagtaagttacagcgacacggtatattagatggtgccaccgtagtgtatataggatcggctcctggtacacatatacgttatttgagagatcatttctataatttaggagtgatcatcaaatggatgctaattgacggccgccatcatgatcctattttaaatggattgcgtgatgtgactctagtgactcggttcgttgatgaggaatatctacgatccatcaaaaaacaactgcatccttctaagattattttaatttctgatgtaagatccaaacgaggaggaaatgaacctagtacggcggatttactaagtaattacgctctacaaaatgtcatgattagtattttaaaccccgtggcatctagtcttaaatggagatgcccgtttccagatcaatggatcaaggacttttatatcccacacggtaataaaatgttacaaccttttgctccttcatattcagctgaaatgagattattaagtatttataccggtgagaacatgagactgactcgagttaccaaattagacgctgtaaattatgaaaaaaagatgtactaccttaataagatcgtccgtaacaaagtagttgttaactttgattatcctaatcaggaatatgactattttcacatgtactttatgctgaggaccgtgtactgcaataaaacatttcctactactaaagcaaaggtactatttctacaacaatctatatttcgtttcttaaatattccaacaacatcaactgaaaaagttagtcatgaaccaatacaacgtaaaatatctagcaaaaattctatgtctaaaaacagaaatagcaagagatccgtacgcggtaataaatagaaacgtgctactgagatatactaccgatatagagtataatgatttagttactttaataaccgttagacataaaattgattctatgaaaactgtgtttcaggtatttaacgaatcatccataaattatactccggttgatgatgattatggagaaccaatcattataacatcgtatcttcaaaaaggtcataacaagtttcctgtaaattttctatacatagatgtggtaatatctgacttatttcctagctttgttagactagatactacagaaactaatatagttaatagtgtactacaaacaggcgatggtaaaaagactcttcgtcttcccaaaatgttagagacggaaatagttgtcaagattctctatcgccctaatataccattaaaaattgttagatttttccgcaataacatggtaactggagtagagatagccgatagatctgttatttcagtcgctgattaatcaattagtagagatgagataagaacattataataatcaataatattatcttatatctcgtttagaaaaatgctaatattaaaatagctaacgctagtaatccaatcggaagccatttgatatctataatagggtatctaatttcctgattcagatagcggacagctatattctcggtagctactcgtttggaatcacaaacattatttacatctaatttactatctgtaatggaaacgtttcccaatgaaatggtacaatccgatacattgcattttgttatatttttttttaaagaggctggtaacaacgcatcgcttcgtttacatggctcgtaccaacaataatagggtaatcttgtatctattcctatccgtactatgcttttatcaggataaatacatttacatcgtatatcgtctttgttagcatcacagaatgcataaatttgttcgtccgtcatgataaaaatttaaagtgtaaatataactattatttttatagttgtaataaaaagggaaatttgattgtatactttcggttctttaaaagaaactgacttgataaaaatggctgtaatctctaaggttacgtatagtctatatgatcaaaaagagattaatgctacagatattatcattagtcatgttaaaaatgacgacgatatcggtaccgttaaagatggtagactaggtgctatggatggggcattatgtaaaacttgtgggaaaacggaattggaatgtttcggtcactggggtaaagtaagtatttataaaactcatatagttaagcctgaatttatttcagaaattattcgtttactgaatcatatatgtattcactgcggattattgcgttcacgagaaccgtattccgacgatattaacctaaaagagttatcgggacacgctcttaggagattaaaggataaaatattatccaagaaaaagtcatgttggaacagcgaatgtatgcaaccgtatcaaaaaattactttttcaaagaaaaaggtttgtttcgtcaacaagttggatgatattaacgttcctaattctctcatctatcaaaagttaatttctattcatgaaaagttttggccattattagaaattcatcaatatccagctaacttattttatacagactactttcccatccctccgctgattattagaccggctattagtttttggatagatagtatacccaaagagaccaatgaattaacttacttattaggtatgatcgttaagaattgtaacttgaatgctgatgaacaggttatccagaaggcggtaatagaatacgatgatattaaaattatttctaataacactaccagtatcaatttatcatatattacatccggcaaaaataatatgattagaagttatatcgtcgcccgacgaaaagatcagaccgctagatctgtaattggtcccagtacatctatcaccgttaatgaggtaggaatgcccgcatatattagaaatacacttacagaaaagatatttgttaatgcctttacagtggataaagttaaacaactattagcgtcaaaccaagttaaattttactttaataaacgattaaaccaattaacaagaatacgccaaggaaagtttatcaaaaataaaatacatttattgcctggtgattgggtagaagtagctgttcaagaatatacaagtattatttttggaagacagccgtctctacatagatacaacgtcatcgcttcatctatcagagctaccgaaggagatactatcaaaatatctcccggaattgccaactctcaaaatgctgatttcgacggagatgaagaatggatgatattggagcaaaatcctaaagccgtaattgaacaaagtattcttatgtatccgacgacgttactcaaacacgatattcatggagcccccgtttatggatctattcaagatgaaatcgtagcagcgtattcattgtttaggatacaagatctttgtttagatgaagtattgaacatcttggggaaatatggaagagagttcgatcctaaaggtaaatgtaaattcagcggtaaagatatctatacttacttgataggtgaaaagattaattatccgggtctcttaaaggatggtgaaattattgcaaacgacgtagatagtaattttgttgtggctatgaggcatctgtcattggctggactcttatccgatcataagtcgaacgtggaaggtatcaactttattatcaagtcatcttatgtttttaagagatatctatctatttacggttttggggtgacattcaaagatctgagaccaaattcgacgttcactaataaattggaggccatcaacgtagaaaaaatagaacttatcaaagaagcatacgccaaatatctcaacgatgtaagagacgggaaaatagttccattatctaaagctttagaggcggactatgtggaatccatgttatccaacttgacaaatcttaatatccgagagatagaagaacatatgagacaaacgctgatagatgatccagataataacctcctgaaaatggccaaagcgggttataaagtaaatcctacagaactaatgtatattctaggtacgtatggacaacaaaggattgatggtgaaccagcagagactcgagtattgggtagagtcttaccttactatcttccagactctaaggatccagaaggaagaggttacattcttaattctttaacaaaaggattaacgggttctcaatattacttttcgatgctggttgccagatctcaatctactgatatcgtctgtgaaacatcacgtaccggaacactggctagaaaaatcattaaaaagatggaggatatggtggtcgacggatacggacaagtagttataggtaatacgctcatcaagtacgccgccaattataccaaaattctaggctcagtatgtaaacctgtagatcttatctatccagatgagtccatgacttggtatttggaaattagtgctctgtggaataaaataaaacagggattcgtttactctcagaaacagaaacttgcaaagaagacattggcgccgtttaatttcctagtattcgtcaaacccaccactgaggataatgctattaaggttaaggatctgtacgatatgattcataacgtcattgatgatgtgagagagaaatacttctttacggtatctaatatagattttatggagtatatattcttgacgcatcttaatccttctagaattagaattacaaaagaaacggctatcactatctttgaaaagttctatgaaaaactcaattatactctaggtggtggaactcctattggaattatttctgcacaggtattgtctgagaagtttacacaacaagccctgtccagttttcacactactgaaaaaagtggtgccgtcaaacaaaaacttggtttcaacgagtttaataacttgactaatttgagtaagaataagaccgaaattatcactctggtatccgatgatatctctaaacttcaatctgttaagattaatttcgaatttgtatgtttgggagaattaaatccagacatcactcttcgaaaagaaacagataaatatgtagtagatataatagttaatagattatacatcaagagagcagaaataaccgaattagttgtcgaatatatgattgaacgatttatctcctttagcgtcattgtaaaggaatggggtatggagacattcattgaggacgaggataatattagatttactgtctacctaaatttcgttgaaccggaagaattgaatcttagtaagtttatgatggttcttccgggtgccgccaacaagggcaagattagtaaattcaagattcctatctctgattatacgggttatgacgacttcaatcaaacaaaaaagctcaataagatgactgtagaactcatgaatctaaaagaattgggttctttcgatttggaaaacgtcaacgtgtatcctggagtatggaatacatacgatatcttcggtatcgaggccgctcgtgaatacttgtgcgaagccatgttaaacacctatggagaagggttcgattatctgtatcagccttgtgatcttctcgctagtttactatgtgctagttacgaaccagaatcagttaataaattcaagttcggtgcagctagtactcttaagagagctacgttcggagacaataaagcattgttaaacgcggctcttcataaaaagtcagaacctattaacgataatagtagctgccacttttttagcaaggtccctaatataggaactggatattacaaatactttatcgacttgggtcttctcatgagaatggaaaggaaactatctgataagatatcttctcaaaagatcaaggaaatggaagaaacagaagacttttaattcttatcaataacatatttttctatgatctgtcttttaaacgatggattttccacaaatgcgcctctcaagtccctcatagaatgatacacgtataaaaaatatagcataggcaatgactccttatttttagacattagatatgccaaaatcatagccccgcttctatttactcccgcagcacaatgaaccaacacgggctcgtttcgttgatcacatttagataaaaaggcggttacgtcgtcaaaatatttactaatatcggtagttgtatcatctaccaacggtatatgaataatattaatattagagttaggtaatgtatatttatccatcgtcaaatttaaaacatatttgaacttaacttcagatgatggtgcatccatagcatttttataatttcccaaatacacattattggttacccttgtcattatagtgggagatttggctttgtgcatatctccagttgaacgtagtagtaagtatttatacaaacttttcttatccatttataacgtacaaatggataaaactactttatcggtaaacgcgtgtaatttagaatacgttagagaaaaggctatagtaggcgtacaagcagccaaaacatcaacacttatattctttgttattatattggcaattagtgcgctattactctggtttcagacgtctgataatccagtctttaatgaattaacgagatatatgcgaattaaaaatacggttaacgattggaaatcattaacggatagcaaaacaaaattagaaagtgatagaggtagacttctagccgctggtaaggatgatatattcgacttcaaatgtgtggatttcggcgcctattttatagctatgcgattggataagaaaacatatctgccgcaagctattaggcgaggtactggagacgcgtggatggttaaaaaggcggcaaaggtcgatccatctgctcaacaattttgtcagtatttgataaaacacaagtctaataatgttattacttgtggtaatgagatgttaaatgaattaggttatagcggttattttatgtcaccgcattggtgttccgattttagtaatatggaatagtgttagataaatgcggtaacgaatgttcctgtaaggaaccataacagtttagatttaacgttaaagatgagcataaacataataaacaaaattacaatcaaacctataacattaatatcaaacaatccaaaaaatgaaatcagtggagtagtaaacgcgtacataactcctggataacgtttagcagctgccgttcctattctagaccaaaaattcggtttcatgttttcgaagcggtgttctgcaacaagtcggggatcgtgttctacatatttggcggcgttatccagtatctgcctattgatcttcatttcgttttcgattctggctatttcaaaataaaatcccgatgatagacctccagactttataatttcatctacgatgttcagcgccgtagtaactctaataatataggctgataagctaacatcataccctcctgtatatgtgaatatggcatgatttttgtccattacaagctcggttttaactttattgcctgtaataatttctctcatctgtaggatatctatttttttgtcatgcattgccttcaagacgggacgaagaaacgtaatatcctcaataacgttatcgttttctacaataactacatattctacctttttattttctaactcggtaaaaaaattagaatcccatagggctaaatgtctagcgatatttcttttcgtttcctctgtacacatagtgttacaaaaccctgaaaagaagtgagtatacttgtcatcatttctaatgtttcctccagtccactgtataaacgcataatccttgtaatgatctggatcatccttgactaccacaacatttcttttttctggcataacttcgttgtcctttacatcatcgaacttctgatcattaatatgctcatgaacattaggaaatgtttctgatggaggtctatcaataactggcacaacaataacaggagttttcaccgccgccatttagttattgaaattaatcatatacaactctttaatacgagttatattttcgtctatccattgtttcacatttacatatttcgacaaaaagatataaaatgcgtattccaatgcttctctgtttaatgaattactaaaatatacaaacacgtcactgtctggcaataaatgatatcttagaatattgtaacaatttattttgtattgcacatgttcgtgatctatgagttcttcttcgaatggcataggatctccgaatctgaaaacgtataaataggagttagaataataatatttgagagtattggtaatatataaactctttagcggtataattagtttttttctctcaatttctatttttagatgtgatggaaaaatgactaattttgtagcattagtatcatgaactctaatcaaaatcttaatatcttcgtcacacgttagctctttgaagtttttaagagatgcatcagttggttctacagatggagtaggtgcaacaattttttgttctacacatgtatgtactggagccattgttttaactataatggtgcttgtatcgaaaaactttaatgcagatagcggaagctcttcgccgcgactttctacatcgtaattgggttctaacgccgatctctgaatggatactagttttctaagttctaatgtgattctctgaaaatgtaaatccaattcctccggcattatagatgtgtatacatcggtaaataaaactatagtatccaacgatcccttctcgcaaattctagtcttaaccaaaaaatcgtatataaccacggagatggcgtatttaagagtggattcttctaccgttttgttcttggatgtcatataggaaactataaagtccgcactactgttaagaatgattactaacgcaactatatagttcaaattaagcattttggaaacataaaataactctgtagacgatacttgactttcgaataagtttgcagacaaacgaagaaagaacagacctctcttaatttcagaagaaaactttttttcgtattcctgacgtctagagtttatatcaataagaaagttaagaattagtcggttaatgttgtatttcattacccaagtttgagatttcataatattatcaaaagacatgataatattaaagataaagcgctgactatgaacgaaatagctatatggttcgctcaagaatatagtcttgttaaacgtggaaacgataactgtatttttaatcacgtcagcggcatctaaattaaatataggtatatttattccacacactctacaatatgccacaccatcttcataataaataaattcgttagcaaaattattaattttagtgaaatagttagcgtcaactttcatagcttccttcaatctaatttgatgctcacacggtgcgaattccactctaacatcccttttccatgcctcaggttcatcgatctctataatatctagtttcttgcgtttcacaaacacgggctcgtctctcgcgatgagatctgtatagtaactatgtaaatgataactagatagaaagatgtagctatatagatgacgatcctttaagagaggtataataactttaccccaatcagataaactattgttatggtcttcggaaaaagaatttttataaatttttccagtattttccaaatatacgtacttgacatctaaaaaatccttaatgataataggaatggataatccgtctattttataaagaaatacatatcgcacattatacttttttttggaaatgggaataccgatgtgtctacataaatatgcaaagtctaaatattttttagagaatcttagttggtccaaattcttttccaagtacggtaatagatttttcatattgaacggtatcttcttaatctctggttctagttccgcattaaatgatgaaactaagtcactatttttataactaacgattacatcacctctaacatcatcatttaccagaatactgatcttcttttgtcgtaaatacatgtctaatgtgttaaaaaaaagatcatacaagttatacgtcatttcatctgtggtattcttgtcattgaaggataaactcgtactaatctcttctttaacagcctgttcaaatttatatcctatatacgaaaaaatagcaaccagtgtttgatcatccgcgtcaatattctgttctatcgtagtgtataacaatcgtatatcttcttctgtgatagtcgatacgttataaaggttgataacgaaaatatttttatttcgtgaaataaagtcatcgtaggattttggacttatattcgcgtctagtagatatgcttttatttttggaatgatctcaattagaatagtctctttagagtccatttaaagttacaaacaactaggaaattggtttatgatgtataatttttttagtttttatagattctttattctatacttaaaaaatgaaaataaatacaaaggttcttgagggttgtgttaaattgaaagcgagaaataatcataaattatttcattatcgcgatatccgttaagtttgtatcgtaatggcgtggtcaattacaaataaagcggatactagtagcttcacaaagatggctgaaatcagagctcatctaaaaaatagcgctgaaaataaagataaaaacgaggatattttcccggaagatgtaataattccatctactaagcccaaaaccaaacgagccactactcctcgtaaaccagcggctactaaaagatcaaccaaaaaggaggaagtggaagaagaagtagttatagaggaatatcatcaaacaactgaaaaaaattctccatctcctggagtcagcgacattgtagaaagcgtggccgctgtagagctcgatgatagcgacggggatgatgaacctatggtacaagttgaagctggtaaagtaaatcatagtgctagaagcgatctttctgacctaaaggtggctaccgacaatatcgttaaagatcttaagaaaattattactagaatctctgcagtatcgacggttctagaggatgttcaagcagctggtatctctagacaatttacttctatgactaaagctattacaacactatctgatctagtcaccgagggaaaatctaaagttgttcgtaaaaaagttaaaacttgtaagaagtaaatgcgtgcacttttttataaagatggtaaactctttaccgataataattttttaaatcctgtatcagacgataatccagcgtatgaggttttgcaacatgttaaaattcctactcatttaacagatgtagtagtatatgaacaaacgtgggaggaggcgttaactagattaatttttgtgggaagcgattcaaaaggacgtagacaatacttttacggaaaaatgcatgtacagaatcgcaacgctaaaagagatcgtatttttgttagagtatataacgttatgaaacgaattaattgttttataaacaaaaatataaagaaatcgtccacagattccaattatcagttggcggtttttatgttaatggaaactatgttttttattagatttggtaaaatgaaatatcttaaggagaatgaaacagtagggttattaacactaaaaaataaacacatagaaataagtcccgatgaaatagttatcaagtttgtaggaaaggacaaagtttcacatgaatttgttgttcataagtctaatagactatataagccgctattgaaactgacggatgattctagtcccgaagaatttctgttcaacaaactaagtgaacgaaaggtatacgaatgtatcaaacagtttggtattagaatcaaggatctccgaacgtatggagtcaattatacgtttttatataatttttggacaaatgtaaagtccatatctcctcttccatcaccaaaaaagttaatagcgttaactatcaaacaaactgctgaagtggtaggtcatactccatcaatttcaaaaagagcttacatggcaacgactattttagaaatggtaaaggataaaaattttttagatgtagtatctaaaactacgttcgatgaattcctatctatagtcgtagatcacgttaaatcatctacggatggatgatatagatctttacacaaataattacaagaccgataaatggaaatggataagcgtatgaaatctctcgcaatgacagctttcttcggagagctaaacacattagatattatggcattgataatgtctatatttaaacgccatccaaacaataccattttttcagtggataaggatggtcagtttatgattgatttcgaatacgataattataaggcttctcaatatttggatctgaccctcactccgatatctggagatgaatgcaagactcacgcatcgagtatagccgaacaattggcgtgtgtggatattattaaagaggatattagcgaatatatcaaaactactccccgtcttaaacgatttataaaaaaataccgcaatagatcagatactcgtatcagtcgagatacagaaaagcttaaaatagctctagctaaaggcatagattacgaatatataaaagacgcttgttaataagtaaatgaaaaaaaactagtcgtttataataaaacacaatatggatgccaacatagtatcatcttctactattgcaacgtatatagacgctttagcaaagaatgcttcagaattagaacagaggtctaccgcatacgaaataaataatgaattggaactagtatttattaagccgccattaattactttgacaaatgtagtgaatatctctacgattcaggaatcgtttattcgatttaccgttactaataaggaaggtgtcaaaattagaactaagattccattatctaaggtacatggtctagatgtaaaaaatgtacagttagtagatgctatagataacatagtttgggaaaagaaatcattagtgacggaaaatcgtcttcacaaagaatgcttgttgagactatcgacagaggaacgtcatatatttttggattacaagaaatatggatcctctatccgactagaattagtcaatcttattcaagcaaaaacaaaaaactttacgatagactttaagctaaaatattttctaggatccggtgcccaatctaaaagttctttgttgcacgctattaatcatccaaagtcaaggcctaatacatctctggaaatagaattcacacctagagacaatgaaaaagttccatatgatgaactaataaaggaattgacgactctatcacgtcatatatttatggcttctccagagaatgtaattctttctccgcctattaacgcacctataaagacttttatgttgcctaaacaagatatagtaggtctggatctggaaaatctatatgccgtaactaagactgacggcattcctataactatcagagttacatcaaacgggttgtattgttattttacacatcttgggtatattattagatatccagttaagagaataatagattccgaagtagtagtctttggtgaggcagttaaggataagaactggaccgtatatctcattaagctaatagagcctgtgaatgcaatcaatgatagactagaagaaagtaagtatgttgaatctaaactagtggatatttgtgatcggatagtattcaagtcaaagaaatatgaaggtccgtttactacaactagtgaagtcgtcgatatgttatctacatatttaccaaagcaaccagaaggtgttattctgttctattcaaagggacctaaatctaacattgattttaaaattaaaaaggaaaatactatagaccaaactgcaaatgtagtatttaggtacatgtccagtgaaccaattatctttggagaatcgtctatctttgtagagtataagaaatttagcaacgataaaggctttcctaaagaatatggttctggtaagattgtgttatataacggcgttaattatctaaataatatctattgtttggaatatattaatacacataatgaagtgggtattaagtccgtggttgtacctattaagtttatagcagaattcttagttaatggagaaatacttaaacctagaatcgataaaaccatgaaatatattaactcagaagattattatggaaatcaacataatatcatagtcgaacatttaagagatcaaagcatcaaaataggagatatctttaacgaggataaactatcggatgtgggacatcaatacgccaataatgataaatttagattaaatccagaagttagttattttacgaataaacgaactagaggaccgttgggaattttatcaaactacgtcaagactcttcttatttctatgtattgttccaaaacatttttagacgattccaacaaacgaaaggtattggcgattgattttggaaacggtgctgacctggaaaaatacttttatggagagattgcgttattggtagcgacggatccggatgctgatgctatagctagaggaaatgaaagatacaacaaattaaactctggaattaaaaccaagtactacaaatttgactacattcaggaaactattcgatccgatacatttgtctctagtgtcagagaagtattctattttggaaagtttaatatcatcgactggcagtttgctatccattattcttttcatccgagacattatgctaccgtcatgaataacttatccgaactaactgcttctggaggcaaggtattaatcactaccatggacggagacaaattatcaaaattaacagataaaaagacttttataattcataagaatttacctagtagcgaaaactatatgtctgtagaaaaaatagctgatgatagaatagtggtatataatccatcaacaatgtctactccaatgactgaatacattatcaaaaagaacgatatagtcagagtgtttaacgaatacggatttgttcttgtagataacgttgatttcgctacaattatagaacgaagtaaaaagtttattaatggcgcatctacaatggaagatagaccgtctacaaaaaactttttcgaactaaatagaggagccattaaatgtgaaggtttagatgtcgaagacttacttagttactatgttgtttatgtcttttctaagcggtaaataataatatggtatgggttctgatatccccgttctaaatgcattaaataattccaatagagcgatttttgttcctataggaccttccaactgtggatactctgtattgttaatagatatattaatacttttgtcgggtaacagaggttctacgtcttctaaaaataaaagtttgataacatctggcctgttcataaataaaaacttggcgattctatatatactcttattatcaaatctagccattgtcttatagatgtgagctactgtaggtgtaccatttgattttctttctaatactatatatttctctcgaagaagttcttgcacatcatctgggaataaaatactactgttgagtaaatcagttattttttttatatcgatattgatggacatttttatagttaaggataataagtatcccaaagtcgataacgacgataacgaagtatttatacttttaggaaatcacaatgactttatcagatcaaaattaacaaaattaaaggagcatgtatttttttctgaatatattgtgactccagatacatatggatctttatgcgtcgaattaaatgggtctagttttcagcacggtggtagatatatagaggtggaggaatttatagatgctggaagacaagttagatggtgttctacatccaatcatatatctgaagatatacccgaagatatacacactgataaatttgtcatttatgatatatacacttttgacgctttcaagaataaacgattggtattcgtacaggtacctccgtcgttaggagatgatagctatttgactaatccgttattgtctccgtattatcgtaattcagtagccagacaaatggtcaatgatatgatttttaatcaagattcatttttaaaatatttattagaacatctgattagaagccactatagagtttctaaacatataacaatagttagatacaaggataccgaagaattaaatctaacgagaatatgttataatagagataagtttaaggcgtttgtattcgcttggtttaacggcgtttcggaaaatgaaaaggtactagatacgtataaaaaggtatctaatttgatataatgaattcagtgactgtatcacacgcgccatatactattacttatcacgatgattgggaaccagtaatgagtcaattggtagagttttataacgaagtagccagttggctgctacgagacgagacgtcgcctattcctgataagttctttatacagttgaaacaaccgcttagaaataaacgagtatgtgtgtgcggtatagatccgtatccgaaagatggaactggtgtaccgttcgaatcaccaaattttacaaaaaaatcaattaaggagatagcttcatctatatctagattaaccggagtaattgattataaaggttataaccttaatataatagacggggttataccctggaattattacttaagttgtaaattaggagaaacaaaaagtcacgcgatctactgggataagatttccaagttactgctgcagcatataactaaacacgttagtgttctttattgtttgggtaaaacagatttctcgaatatacgggcaaagttagaatccccggtaactaccatagtgggatatcatccagcggctagagaccgtcaattcgagaaagatcgatcatttgaaattatcaacgttttactggaattagacaacaaggtacctataaattgggctcaagggtttatttattaatgctttagtgaaattttaacttgtgttctaaatggatgcggctattagaggtaatgatgttatctttgttcttaagactataggtgtcccgtcagcgtgcagacaaaatgaagatccaagatttgtagaagcatttaaatgcgacgagttagaaagatatattgagaataatccagaatgtacactattcgaaagtcttagggatgaggaagcatactctatagtcagaattttcatggatgtagatttagacgcgtgtctagacgaaatagattatttaacggctattcaagattttattatcgaggtgtcaaactgtgtagctagattcgcgtttacagaatgcggcgccattcatgaaaatgtaataaaatccatgagatctaatttttcattgactaagtctacaaatagagataaaacaagttttcatattatctttttagacacgtataccactatggatacattgatagctatgaaacgaacactattagaattaagtagatcatctgaaaatccactaacaagatcgatagacactgccgtatataggagaaaaacaactcttcgggttgtaggtactaggaaaaatccaaattgcgacactattcatgtaatgcaaccacctcatgataatatagaagattacctattcacttacgtggatatgaacaacaatagttattacttttctctacaacgacgattggaggatttagttcctgataagttatgggaaccagggtttatttcattcgaagacgctataaaaagagtttcaaaaatattcattaattctataataaactttaatgatctcgatgaaaataattttacaacggtaccactggtcatagattacgtaacaccttgtgcattatgtaaaaaacgatcgcataaacatccgcatcaactatcgttggaaaatggtgctattagaatttacaaaactggtaatccacatagttgtaaagttaaaattgttccgttggatggtaataaactgtttaatattgcacaaagaattttagacactaactctgttttattaaccgaacgaggagaccatatagtttggattaataattcatggaaatttaacagcgaagaacccttgataacaaaactaattttgtcaataagacatcaactacctaaggaatattcaagcgaattactctgtccaagaaaacgaaagactgtagaagctaacatacgagacatgttagtagattcagtggagaccgatacctatccggataaacttccgtttaaaaatggtgtattggacctggtagacggaatgttttactctggagatgatgctaaaaaatatatgtgtactgtatcaaccggatttaaatttgacgatacaaagttcgtcgaagacagtccagaaatggaagagttaatgaatatcattaacgatatccaaccattaacggatgaaaataagaaaaatagagagctatatgaaaaaacattatctagttgtttatgcggtgctaccaaaggatgtttaacattcttttttggagaaactgcaactggaaagtcgacaaccaaacgtttgttaaagtctgctatcggtgacctgtttgttgagacgggtcaaacaattttaacagatgtattggataaaggacctaatccatttatcgctaacatgcatttgaaaagatctgtattctgtagcgaactacctgattttgcatgtagtgggtcaaagaaaatcagatctgataatattaaaaagttgacagaaccttgtgtcattggaagaccgtgtttctccaataaaattaataatagaaaccatgcgacaatcattatcgatactaattacaaacctgtttttgataggatagataacgcattaatgagaagaattgccgtcgtgcgattcagaacacacttttctcaaccttctggtagagaggctgctgaaaataatgacgcgtacgataaagtcaaactattagacgaggggttagatggtaaaatacaaaataatagatatagattcgcatttctatacttgttggtgaaatggtacagaaaatatcatgttcctattatgaaactatatcctacacccgaagagattcctgactttgcattctatctcaaaataggtactctgttggtatctagctctgtaaagcatattccattaatgacggacctctccaaaaagggatatatattgtacgataatgtggtcactcttccgttgactactttccaacagaaaatatccaagtattttaattctagactatttggacacgatatagagagcttcatcaatagacataagaaatttgccaatgttagtgatgaatatctgcaatatatattcatagaggatatttcatctccgtaaatatatgctcatatatttatagaagatatcacatatctaaatgaataccggaattatagatttatttgataatcatgttgatagtataccaactatattacctcatcagttagctactctagattatctagttagaactatcatagatgagaacagaagcgtgttattgttccatattatgggatcaggtaaaacaataatcgctttgttgttcgccttggtagcttccagatttaaaaaggtttacattctagtgccgaacatcaacatcttaaaaattttcaattataatatgggtgtagctatgaacttgtttaatgacgaattcatagctgagaatatctttattcattccacaacaagtttttattctcttaattataacgataacgtcattaattataacggattatctcgctacaataactctatttttatcgttgatgaggcacataatatctttgggaataatactggagaacttatgaccgtgataaaaaataaaaacaagattccttttctactattgtctggatctcccattactaacacacctaatactctgggtcatattatagatttaatgtccgaagagacgatagattttggtgaaattattagtcgtggtaagaaagtaattcagacacttcttaacgaacgcggtgtgaatgtacttaaggatttgcttaaaggaagaatatcatattacgaaatgcctgataaagatctaccaacgataagatatcacggacgtaagtttctagatactagagtagtatattgtcacatgtctaaacttcaagagagagattatatgattactagacgacagctatgttatcatgaaatgtttgataaaaatatgtataacgtgtcaatggcagtattgggacaacttaatctgatgaataatttagatactttatttcaggaacaggataaggaattgtacccaaatctgaaaataaataatggcgtgttatacggagaagaattggtaacgttaaacattagttccaaatttaaatactttattaatcggatacagacactcaacggaaaacattttatatacttttctaattctacatatggcggattggtaattaaatatatcatgctcagtaatggatattctgaatataatggttctcagggaactaatccacatatgataaacggcaaaccaaaaacatttgctatcgttactagtaaaatgaaatcgtctttagaggatctattagatgtgtataattctcctgaaaacgatgatggtagtcaattgatgtttttgttttcatcaaacattatgtccgaatcctatactctaaaagaggtaaggcatatttggtttatgactatcccagatactttttctcaatacaaccaaattcttggacgatctattagaaaattctcttacgccgatatttctgaaccagttaatgtatatcttttagccgccgtatattccgatttcaatgacgaagtgacgtcattaaacgattacacacaggatgaattaattaatgttttaccatttgacatcaaaaagctgttatatctaaaatttaagacgaaagaaacgaatagaatatactctattcttcaagagatgtctgaaacgtattctcttccaccacatccatcaattgtaaaagttttattgggagaattggtcagacaatttttttataataattctcgtattaagtataacgataccaagttacttaaaatggttacatcagttataaaaaataaagaagacgctaggaattacatagatgatattgtaaacggtcacttctttgtatcgaataaagtatttgataaatctcttttatacaaatacgaaaacgatattattacagtaccgtttagactttcctacgaaccatttgtttggggagttaactttcgtaaagaatataacgtggtatcttctccataaaactgatgagatatataaagaaataaatgtcgagctttgttaccaatggataccttccagttacattggagccacacgagctgacgttagacataaaaactaatattaggaatgccgtatataagacgtatctccatagagaaattagtggtaaaatggccaagaaaatagaaattcgtgaagacgtggaattacctctcggcgaaatagttaataattctgtagttataaacgttccgtgtgtaataacctacgcgtattatcacgttggggatatagttagaggaacattaaacatcgaagatgaatcaaatgtaactattcaatgtggagatttaatctgtaaactaagtagagattcgggtactgtatcatttagcgattcaaagtactgcttttttcgaaatggtaatgcgtatgacaatggcagcgaagtcactgccgttctaatggaggctcaacaaggtatcgaatctagttttgtttttctcgcgaatatcgtcgactcataagaaagagaatagcggtaagtataaacacgaatactatggcaataattgcgaatgttttattcccttcgatatatttttgataatatgaaaaacatgtctctctcaaatcggacaaccatctcataaaatagttatctcgcgctggcgaggtggttgccgctcgtataatctccccagaataatatacttgcgtgtcgtcgttcaatttatacggatttctatagttctctgttatataatgcggttttccatcatgattagacgacgacaatagtgttctaaatttagatagttgatcagaatgaatgtttattggcgttggaaaaattatccatgctgcgtctgcagagtggttgatagttgttcctagatatgtaaaataatccaacgtactaggtagcaaattgtctagataaaatactgaatcaaacggcgcagacgtattagcggatctaatggaatccaattgattgactatcttttgaaaatatacatttttatgatccgatacttgtaagaatatagaaataatgataagtccatcatcgtgtttttttgcctcttcataagaactatattttttcttattccaatgaacaagattaatctctccagagtatttgtacacatctatcaagtgattggatccataatcgtcttcctttccccaatatatatgtagtgatgataacacatattcattggggagaaaccctccacttatatatcctcctttaaaattaatccttactagttttccagtgttctggatagtggttggtttcgactcattataatgtatgtctaacggcttcaatcgcgcgttagaaattgcttttttagtttctatattaataggagatagttgttgcggcatagtaaaaatgaaatgataactgtttaaaaatagctcttagtatgggaattacaatggatgaggaagtgatatttgaaactcctagagaattaatatctattaaacgaataaaagatattccaagatcaaaagacacgcatgtgtttgctgcgtgtataacaagtgacggatatccgttaataggagctagaagaacttcattcgcgttccaggcgatattatctcaacaaaattcagattctatctttagagtatccactaaactattacggtttatgtactacaatgaactaagagaaatctttagacggttgagaaaaggttctatcaacaatatcgatcctcactttgaagagttaatattattgggtggtaaactagataaaaaggaatctattaaagattgtttaagaagagaattaaaagaggaaagtgatgaacgtataacagtaaaagaatttggaaatgtaattctaaaacttacaacacgggataaattatttaataaagtatatataggttattgcatggcgtgttttattaatcaatcgttggaggatttatcgcatactagtatttacaatgtagaaattagaaagattaaatcattaaatgattgtattaacgacgataaatacgaatatctgtcttatatttataatatgctagttaatagtaaatgaacttttacagatctagtataattagtcagattattaagtataatagacgactagctaagtctattatttgcaaggatgactctcaaattattacactcacggcattcgttaaccaatgcctatggtgtcataaacgagtatccgtgtccgctattttattaactactgataacaaaatattagtatgtaacagacgagatagttttctctattctgaaataattagaactagaaacatgtttagaaagaaacgattatttctgaattattccaattatttgtccaaacaggaaagaagtatactatcgtcatttttttctctatatccagctactgctgataatgatagaatagacgctatttatccgggtggcatacccaaaaggggtgagaatgttccagagtgtctatccagggaaatcaaagaagaagttaatatagacaattcttttgtattcatagacactcggttttttattcatggtatcatagaagataccattatcaacaaattttttgaggtaattttctttgtcggaagaatatctctaacgagtgatcaaattattgatacctttaaaagtaatcatgaaatcaaggatctaatatttttagatccgaattcaggtaatggactccaatacgaaattgcaaaatatgctctagatactgcaaaacttaaatgttacggccatagaggatgttattatgaatcattaaaaaaattaactgaggatgattgattagaaaatataaattaatttaccatcgtgtatttttataacgggattgtccggcatatcatgtagatagttaccgtctacatcgtatactcgaccatctacgcctttaaatcctctatttattgacattaatctattagaattggaataccaaatattagtaccctcaattagtttattggtaatattttttttagacgatagatcgatggctcttgaaaccaaggttttccaaccggactcattgtcgatcggtgagaagtctttttcattagcatgaatccattctaatgatgtatgtttaaacactctaaacaattggacaaattcttttgatttgctttgaatgatttcaaataggtcttcgtctacagtaggcataccattagataatctagccattataaagtgcacgtttacatatctacgttctggaggagtaagaacgtgactattgagacgaatggctcttcctactatctgacgaagagacgcctcgttccatgtcatatctaaaatgaagatatcattaattgagaaaaaactaataccctcgcctccactagaagagaatacgcatgttttaatgcattctccgttagtgtttgattcttggttaaactcagccaccgccttgattctagtatcttttgttctagatgagaactctatattagagataccaaagactttgaaatatagtaataagatttctattcctgactgattaacaaatggttcaaagactagacatttaccatgggatgctaatattcccaaacatacatctataaatttgacgcttttctcttttaattcagtaaatagagagatatcagccgcactagcatcccctttcaatagttctccctttttaaaggtatttaatgcggatttagaaaactctctatctcttaatgaatttttaaaatcattatatagtgttgctatctcttgcgcgtattcgccgggatcacgattttgtctttcaggaaagctatcgaacgtaaacgtagtagccatacgtctcagaattctaaatgatgatataccagtttttatttctgcgagtttagccttttgataaatctcttcttgcttttttgacatattaacgtatcgcattaatactgttttcttagcgaatgatgcagacccttctacgttatcaaaaatagaaaactcgttattaactatgtacgaacataggcctcctagtttggagactaattctttttcatcgactagacgtttattctcaaatagtgattggtgttgtaaggatcctggtcgtagtaagttaaccaacatggtgaattcttgcacactattgacgataggtgtagccgataaacaaatcatcttatggttttttaatgcgatggtcttggataaaaaattatatactgaacgagtaggacggatcttaccatcttctttgattaatgatttagaaatgaagttatgacattcatcaataatgacgcatattctactcttggaattaatagttttgatattagtaaaaaatttatttctaaaattttgatcatcgtaattaataaaaatacaatccttcgttatctctggagcgtatctgagtatagtgttcatccaaggatcttctatcaaagcctttttcaccaataagataatagcccaattcgtataaatatccttaagatgtttgagaatatatacagtagtcattgttttaccgacacccgtttcatggaacaataaaagagaatgcatactgtctaatcctaagaaaactcttgctacaaaatgttgataatccttgaggcgtactacgtccgaccccatcatttcaacgggcatattagtagttctgcgtaaggcataatcgatataggccgcgtgtgatttactcatttatgagtgataagtaataactatgttttaaaaatcacagcagtagtttaactagtcttctctgatgtttgttttcgatactttttgaatcagaagtcatactagaataaagcaacgagtgaacgtaatagagagcttcgtatactctattcgaaaactctaagaacttattaatgaattccgtatccactggattgtttaaaatactaaattgaacactgttcacatccttccaagaagaagacttagtgacggacttaacatgagacataaataaatccaaattttttttacaaacatcactagccaccataatggcgctatctttcaaccagctatcgcttacgcattttagcagtctaacatttttaaagagactacaatatattctcatagtatcgattacacctctaccgaataaagttggaagtttaataatacaatatttttcgtttacaaaatcaaataatggtcgaaacacgtcgaaggttaacatcttataatcgctaatgtatagattgttttcagtgagatgattattagatttaatagcatctcgttcacgtttgaacagtttattgcgtgcgctgaggtcggcaactacggcgtccgctttagtactcctcccataatactttacgctattaatctttaaaatttcatagactttatctagatcgctttctggtaacatgatatcatgtgtaaaaagttttaacatgtcggtcggcattctatttagatcattaactctagaaatctgaagaaagtaattagctccgtattccagactaggtaatgggcttttacctagagacagattaagttctggcaatgtttcataaaatggaagaaggacatgcgttccctcccggatattttttacaatttcatccatttacaactctatagtttgttttcattattattagttattatctcccataatcttggtaatacttaccccttgatcgtaagataccttatacaggtcattacatacaactaccaattgtttttgtacataatagattggatggttgacatccatggtggaataaactactcgaacagatagtttatctttccccctagatacattggccgtaatagttgtcggcctaaagaatatctttggtgtaaagttaaaagttagggttcttgttccattattgctttttgtcagtagttcattataaattctcgagatgggtccgttctctgaatatagaacatcatttccaaatctaacttctagtctagaaataatatcggtcttattcttaaaatctattcccttgatgaagggatcgttaatgaacaaatccttggcctttgattcggctgatctattatctccgttatagacgttacgttgactagtccaaagacttacaggaatagatgtatcgatgatgttgatactatgtgatatgtgagcaaagattgttctcttagtggcatcactatatgttccagtaatggcggaaaactttttagaaatgttatatataaaagaattttttcgtgttccaaacattagcagattagtatgaagataaacactcatattatcaggaacattatcaatttttacatacacatcagcatcttgaatagaaacgataccatcttctggaacctcaacaatctcggcagactccggataaccagtcggtggaccatcgctaacaataactagatcatccaacaatctactcacatatgcatctatataatctttttcatcttgtgagtaccctggatacgaaataaatttattatccgtatttccataataaggtttagtataaacagagagcgatgttgccgcatgaacttcagttacagtcgccgttggttggtttatttgacctattactctcctaggtttctctataaacgatggtttaatttgtacattcttaaccatatatccaataaagctcaattcaggaacataaacaaattctttgttgaacgtttcaaagtcgaacgaagagtcacgaataacgatatcggatactggattgaaggttaccgttacggtaatttttgaatcggatagtttaagactgctgaatgtatcttccacatcaaacggagttttaatataaacgtatactgtagatggttctttaatagtgtcattaggagttaggccaatagaaatatcattaagttcactagaatatccagagtgtttcaaagcaattgtattattgatacaattattatataattcttcgccctcaatttcccaaataacaccgttacacgaagagatagatacgtgattaatacatttatatccaacatatggtacgtaaccgaatcttcccatacctttaacttctggaagttccaaactcagaaccaaatgattaagcgcagtaatatactgatccctaatttcgaagctagcgatagcctgattgtctggaccatcgtttgtcataactccggatagagaaatatattgcggcatatataaagttggaatttgactatcgactgcgaagacattagaccgtttaatagagtcatccccaccgatcaaagaattaatgatagtattattcattttctatttaaaatggaaaaagcttacaataaactccgtagagaaatatctataatttgtgagttttccttaaagtaacagcttccgtaaacgccgtctttatctcttagtaagtttattgtatttataaccttttccttatcttcatagaatactaaaggcaacaaagaaatttttggttcttctctaagagctacgtgagacttaaccatagaagccaacgaatccctacatattttagaacagaaataccctacttcaccacccttgtatgtctcaatactaataggtctaaaaaccaaatcttgattacaaaaccaacacttatcaattacactatttgtcttaatagacacatctgccatagatttataatactttggtagtatacaagcgagtgcttcttctttagcgggcttaaagactgctttaggtgctgaaataaccacatctggaaggcttactcgcttagccatttaattacggaactatttttttatacttctaatgagcaagtagaaaacctctcatctacaaaaacatactcgtgtccataatcctctaccatagttacacgttttttagatctcatatgtgctaaaaagttttcccatactaattggttactattatttttcgtataatttttaacagtttgaggttttagatttttagttacagaagtgatatcgaatattttatccaaaaagaatgaataattaattgtcttagaaggagtgttttcttggcaaaagaataccaagtgcttaaatatttctactacttcattaatcttttctgtactcagattcagtttctcatcttttacttgattgattatttcaaagactaacttataatcctttttatttattctctcgttagccttaagaaaactagatacaaaatttgcatctacatcatccgtggatatttgatttttttccatgatatccaagagttccgagataatttctccagaacattgatgagacaataatctccgcaatacatttctcaaatgaataagtttattagacacgtggaagtttgactttttttgtacctttgtacatttttgaaataccgactcgcaaaaaatacaatattcatatccttgttcagatactataccgttgtgtctacaaccgctacataatcgtagattcatgttaacactctacgtatctcgtcgtccaatattttatataaaaacattttatttctagacgttgccagaaaatcctgtaatacttttagttttttgggctgtgaataaagtatcgccctaatatggttaccgtcctccgccaatatagtagttaaattatccgcacatgcaaaagaacaccgcttaggcggattcagtacaatgttatatttttcgtaccaactcatttaaatatcataatctaaaatagttctgtaatatgtctagcgctaatatattgatcataatcctgtgcataaattaagatacaacaatgtctcgaaatcatcgacatggcttcttccatagttagaagatcgtcgtcaaagttagcaacgtgattcatcaacatttgctgttttgaggcagcaaatactgaaccgtcgccattcaaccattcataaaaaccatcgtctgaatccattgataatttcttgtactggtttttgagagctcgcatcaatctagcatttctagctcccggattgaaaacagaaagaggatcgtacatccagggtccattttctgtaaatagaatcgtataatgtcccttcaagaagatatcagacgatccacaatcaaagaattggtctccgagtttgtaacaaactgcggactttaacctatacatgataccgtttagcataatttctggtgatacgtcaatcggagtatcatctattagagatctaaagccggtgtaacattctccaccaaacatattcttattctgacgtcgttctacataaaacatcattgctccattaacgataacaggggaatgaacagcactacccatcacattagttcccaatggatcaatgtgtgtaactccagaacatcttccatagcctatgttaggaggagcgaacaccactcttccactattgccatcgaatgccatagaataaatatccttggaattgatagaaatcggactgtcggatgttgtgatcatcttcataggattaacaacgatgtatggtgccgcctgaagtttcatatcgtaactgatgccgttcataggtctagccacagaaaccaacgtaggtctaaatccaactatagacaaaatagaagccaatatctgttcctcatctgtcataacttgagagcatccagtatgaataatcttcattagatggggatctaccgcatcatcatcgttacaataaaaaattcccattctaatgttcataattgcttttctaatcatggtatgcatgtttgctctctgaatctctgtggaaattagatctgatacacctgtaatcactatcggattatcctccgtaagacgattaaccaacaacatataattataagactttacttttctaaattcataaagttgctggattaggctataggtgtctccatgtacatacgcgttctcgagcgcaggaagtttaataccgaatagtgccatcagaataggatgaatatagtaattagtttctggttttctataaataaaagacaaatcttgtgaactagacatatcggtaaaatgcatggattggaatcgtgtagtcgacagaagaatatgatgattagatggagagtatattttatctaactctttgagttggtcaccgattctaggactagctcgagaatgaataagtactaaaggatgagtacatttcacagaaacactagcattgttcaatgtgctctttacatgggtaaggagttgaaatagctcgtttctatttgttctgacaatatttagtttattcataatgttaagcatatcctgaatagtaaagttagatgtgtcatacttgttagtagttagatatttagcaattgcattcccatcatttctcaatctcgtactccaatcatgcgtggatgctacttcgtcgatggaaaccatacaatcctttttgataggctgttgagattgattatttcctgcacgtttaggtttggtacgttgatttctagcccctgcggatataaagtcatcgtctacaatttgggacaatgaattgcatacactacaagacaaagatttatcagaagtgtgaatatgatcttcatctaccaaagaaagagtttgattagtataactagattttagtcctgcgttagatgttaaaaaaacatcgctattgaccacggcttccattatttatattcgtagtttttactcgaaagcgtgattttaatatccaatcttattacttttggaatcgttcaaaacctttgactagttgtagaatttgatctattgccctacgcgtatactcccttgcatcatatacgttcgtcaccagatcgtttgtttcggcctgaagttggtgcatatctttttcaacactcgacatgagatccttaagggccatatcgtctagattttgttgagatgctgctcctggatttggattttgttgtgctgttgtacatactgtaccaccagtaggtgtaggagtacatacagtggccacaataggaggttgaggaggtgtaaccgttggagtagtacaagaaatatttccatccgattgttgtgtacatgtagttgttggtaacgtctgagaaggttgggtagatggcggtgtcgtcgtcttttgatctttattaaatttagagataatatcctgaacagcattgctcggcgtcaacgctggaaggagtgaactcgccggcgcatcagtatctgcagacagccaatcaaaaagattagacatatcagatgatgtattagtttgttgtcgtggttttggtgtaggagcagtactactaggtagaagaataggagccgatgtaggtgtcggaaccggctgtggagttatatgaatagttggttgtagcggttggataggctgtctgctggcggccatcatattatctctagctagttgttctcgcaactgtctttgataatacgactcttgagactttagtcctatttcaatcgcttcatcctttttcgtatccggatccttttcttcagaataatagattgacgactttggtgtagaggattctgccagcccctgtgagaacttgttaaagaagtccatttaaggctttaaaattgaattgcgattataagattaaatggcagacacagacgatattatcgactatgaatccgatgatctcactgaatacgaggatgatgaagaagaggaagaagatggagagtcactagaaactagtgatatagatcccaaatcttcttataagattgtagaatcagcatccactcatatagaagatgcgcattccaatcttaaacatatagggaatcatatatctgctcttaaacgacgctatactagacgtataagtctatttgaaatagcgggtataatagcagaaagctataacttgcttcaacgaggaagattacctctagtttcagaattttctgacgaaacgatgaagcaaaatatgctacatgtaattatacaagagatagaggagggttcttgtcctatagtcatcgaaaagaacggagaattgttgtcggtaaacgattttgacaaagatggtctaaaattccatctagactatattatcaaaatttggaaacttcaaaaacgatattagaatttatacgaatatcgttctctaaatgtcacaatcaagtctcgcatgttcagcaatttattgtcgtactttatatcgtgttcattaacgatatcttgcaaaatagtaatgattctatcttccttcgatagatattcttcagagattattgtcttatattctttcttgttatcagatatgaatttgataagactttgaacattattgatacccgtctgtttaattttttctacagatattttagttttggcagattctatcgtatctgtcaatagacatccaacatcgacattcgacgtcaattgtctataaatcaacgtataaattttagaaataacattagcgaattgttgtgcattgatgtcgttattctgaaacagtatgattttaggtagcattttcttaacaaagagaacgtatttattgttactcagttgaacagatgatatatccagattactaacgcatctgattccgtataccaaactttcagaagaaatggtatacaattgtttgtattcattcaatgtctctttttcagaaattagtttagagtcgaatactgcaataattttcaagagatagttttcatcagataagattttatttagtgtagatatgataaaactattgttttgttggagaacttgatacgccgcgttctctgtagtcgacgctctcaaatgggaaacgatctccattatttttttggaatcggatactatatcttcggtatcttgacgcagtctagtatacatagagttaagagagattagagtttgtacattaagcaacatgtctctaaatgtggctacaaacttttccttttccacatcatctagtttattatataccgatttcacaacggcaccagatttaaggaaccagaatgaaaaactctgataactacaatatttcatcatagttacgattttatcatcttctatagttggtgtaatagcgcatacctttttctccaagactggaaccaacgtcataaaaatgtttaaatcaaaatccatatcaacatctgatgcgctaagaccagtctcgcgttcaagattatctttactaatggtgacgaactcatcgtatagaactctaagtttgtccattatttatttacagatttagttgtttaatttatttgtgctcttccagagttgggatagtatttttctaacgtcggtattatattattaggatctacgttcatatgtatcataatattaatcatccacgttttgataaatctatctttagcttctgaaataacgtatttaaacaaaggagaaaaatatttagctacggcatcagacgcaataacattttttgtaaatgtaacgtatttagacgacagatcttcgttaaaaagttttccatctatgtagaatccatcagttgttaacaccattcccgcgtcagattgaataggagtttgaatagtttgttttggaaatagatccttcaataacttatagttgggtgggaaaaaatcgattttatcactagactctttcttttttactatcattacctcatgaactatttcttgaatgagtatatgtattttctttcctatatcggacgcgttcattggaaaatataccatgtcgttaactataagaatatttttatcctcgtttacaaactgaataatatcagatgtagttcgtaaacgaactatatcatcaccagcacaacatctaactatatgatatccactagtttcctttagtcgtttattatcttgttccatattagcagtcattccatcatttaagaaggcgtcaaagataatagggagaaatgacattttggattctgttacaactttaccaaaattaaggatatacggacttactatctttttctcaacgtcaatttgatgaacacacgatgaaaatgtacttcgatgagattgatcatgtagaaaacaacaagggatacaatatttccgcatatcatgaaatatattaagaaatcccaccttattatatttccccaaaggatccatgcacgtaaacattatgccgttatcattaataaagacttctttctcatcggatctgtaaaagttgttactgatttttttcattccaggatctagataattaataatgatgggttttctattcttattctttgtattttggcatatcctagaccagtaaacagtttccactttggtaaaatcagcagacttttgaacgctattaaacatggcattaatggcaataactaaaaatgtaaaatatttttctatgttaggaatatggtttttcactttaatagatatatggtttttggccaaaatgatagatatttttttatccgaggatagtaaaatattattagtcgccgtctctataaaaatgaagctagtctcgatatccaattttattctagaattgataggagtcgccaaatgtaccttatacgttatatctcccttgatgcgttccatttgtgtatctatatcggacacaagatctgtaaatagttttacgttattaatcatcacggtatcgccgtcgctagataatgctaatgtaccatccaagtcccaaatggagagatttaactgttcatcgtttagaataaaatgattaccggtcatattaataaagtgttcatcgtatctagataacaacgacttataattaatgtccaagtcttgaactcgctgaatgatcttttttaacccagttagttttagattggtacgaaatatattgttaaactttgattctacagtaatgtccaaatctagttgtggaaatacttccatcaacattgtttcaaacttgataatattattatctacatcttcatacgatccaaattccggaatagatgtatcacatgctcttgccacccagataaccaaaaagtcacacgctccaggatatacattgtataaaaagctatcgtttttaagtagggtttttttctgcgtgtatacgaagggattaaaaatagtattatcaacgtaactatattccaaattattcttatgagaatagataataatatcgtccttaatatctaacaaatttcctaaatatccctttaattgagtcattcgaagcgtcaatagaatatgtctcttaactatttccggctgttgtatatttaaatgacttcgtaaaaaataatatatgggcgacttctcatctatgtaatcatatggagtgagatatagggctcgttctacctcctgccccttacccacctgtaataccaattgcggacttactatatatcgcatatttatatcgtggggtaaagtgaaaatctactaccgatgatgtaagtcttacaatgttcgaaccagtaccagatcttaatttggaggcctccgtagaactaggggaggtaaatatagatcaaacaacacctatgataaaggaaaatagcggttttatatcccgtagtagacgtctattcgcccatagatctaaggatgatgagagaaaactagcactacgattctttttacaaagactttattttttagatcatagagagattcattatttgttcagatgcgttgacgctgtaaaagacgtcactattaccaaaaaaaataacattatcgtggcgccttatatagcacttttaactatcgcatcaaaaggatgcaaacttacagaaacaatgattgaagcattctttccagaactatataatgaacatagtaagaaatttaaattcaactctcaagtatccatcatccaagaaaaactcggataccagtttggaaactatcacgtttatgattttgaaccgtattactctacagtagctctggctattcgagatgaacattcatctggcatttttaatatccgtcaagagagttatctggtaagttcattatctgaaataacatatagattttatctaattaatctaaaatctgatcttgttcaatggagtgctagtacgggcgctgtaattaatcaaatggtaaatactgtattgattacagtgtatgaaaagttacaactggtcatagaaaatgattcacaatttacatgttcattggctgtggaatcagaacttccaataaaattacttaaagatagaaatgaattatttacaaaattcatcaacgagttaaaaaagaccagttcattcaagataagcaaacgcgataaggatacgctactaaaatattttacttaggactggagttagaatttatagacgactcatttcgtttatcattattactaccatcattattagtattcttcttgttatcttgttcagaaatatacagcaatgctatgcctaatactaaatacattatcatgcttgcaatggctctaacaacgacgaaccaaaatgaatttggtcgtagcttttgttcacaaaaatacataaagaaatgtctacataaatctatggcgccattggctacttgaaatagcgccagtcctcctacagattttaatatagctgtataacatgacatttattcatcatcaaaagagacagagtcaccatctgtcatatttagattttttttcatgtgttcaaagtatcctctactcatttcattataatagtttatcatacttagaattttaggacggatcaatgagtaagacttgactagatcgtcagtagtaatttgtgcatcgtctattctgcatccgcttcgtcgaataatgtatagcatcgctttgagattctccatagctatcaagtctttatacaatgacatggaaatatctgtgaatactttatacttctccaacatcgatgccttaacatcatcgcctactttagcattgaaaatacgttctattgtgtagatggatgtagcaagatttttaaacaacaatgccatcttacacgatgattgcctcaagtctccaatcgtttgtttagaacgattagctacagagttcaacgcttggctgactagcatattattatctttagaaattgtattcttcaatgaagcgtttatcatatctgtgatttcgttagtcatattacagtctgactgggttgtaatgttatccaacatatcacctatggatacggtacacgtaccagcatttgtaataatcctatctaagatgttgtatggcattgcgcagaaaatatcttctcctgtaatatctccactctcgataaatctactcagattattcttaaatgccttattctctggagaaaagatatcagtgtccatcatttcattaatagtatacgcagaaaagataccacgagtatcaattctatccaagatacttatcggttccgagtcacagataatggtttcctctccttcgggagatcctgcatagaaatatctaggacaatagtttctatactgtctgtaactctgataatctctaaagtcactaactgataccatgaaattgagaagatcaaacgctgaagtaatcaatttttctgcctcgtttttactacaactagttttcatcaatgtagtgacgatgtattgtttagttactcttggtctaatactgatgatagagatattattacttcccataatggatcttctagtagtcaccttaaagcccattgatgcaaatagcagatagataaagtcttggtatgactcctttctaatatagtacggactacctttgtcacccaactttatacccacataagccataacaacctctttaatagccgtttcatgaggtttatcagccatgagcctgagtagttggaagaatctcatgaatcccgtctcagaaagtcctatatgcatgatagatttatctttcctgggaaactctcgtatagtcatagatgaaatactcttcaaagtttctgaaataagattagtaacagtcttacctccgactactctgggtaacaaacatactctaataggtgttttctctgcggagataatatcagaaaggatagagcaataagtagtattattgtgattataaagaccgaatacataacaggtagaatttataaacatcatgtcctgaaggtttttagacttgtattcctcgtaatccataccgtcccaaaacatggatttggtaactttgatagccgtagatctttgttccttcgccaacaggttaaagaaattaataaagaatttgttgtttctatttatgtccacaaattgcacgtttggaagcgtaactgttacgttcactgcagcattttgaggatcgcgagtatgaagtacgatgttattgtttactggtatatctggaaagaaatctaccagtctaggaataagagattgatatcgcatagaaatagtaaagtttataatctcatcatcgaagagcattttgttaccattgtaataaatatccactctgtcatatgtataaatgaagtactgttcaaacatgatgagatgtttatatgttggcatagtagtgagatcgacgtttggtaatggcaatgtattaagattaactccataatgtctagcagcatctgcgatgttataagtgtcgtcaaagcggggtcgatcttgtgctgttatatattgtctaacacctataagattatcaaaatcttgtctgcttaatacaccgttaacaatttttgccttgaattcttttattggtgcattaataacatccttatagaggatgttaaacaaataagtgttatcaaagttaagatctggatatttcttttctgctagaacatccattgagtcggagccatctggtttaatataaccaccgataaatctagctctgtattctgtatccgtcaatctaatattaagaaggtgttgagtgaaaggtggaagatcgtaaaagctgtgagtattaatgataggattagtttccgaactaatgttaattggggtattaataatatctatatttccagcgttaagtgtaacattaaacagttttaattcacgtgacgtggtatcaattaaataattaatgcccaatttggatatagcagcctgaagctcatcttgtttagttacggatcctaatgagttattaagcaatatatcgaacggatgaacgaaggttgttttaagttggtcacatactttgtaatctagacatagatgcggaagaacggtagaaactatacgaaataaatattcagagtcctctaattgatcaagagtaactattgacttaataggcatcatttatttagtattaaatgacgaccgtaccagtgacggatatacaaaacgatttaattacagagttttcagaagataattatccatctaacaaaaattatgaaataactcttcgtcaaatgtctattctaactcacgttaacaacgtggtagatagagaacataatgccgccgtagtgtcatctccagaggaaatatcctcacaacttaatgaagatctatttccagatgatgattcaccggccactattatcgaacgagtacaacctcatactactattattgacgatactccacctcctacttttcgtagagagttattaatatcggaacaacgtcaacaacgagaaaaaagatttaatattacagtatcgaaaaatgctgaagcaataatggaatctagatctatgataacttctatgccaacacaaacaccatccttgggagtagtttatgataaagataaaagaattcagatgttagaggatgaagtggttaatcttagaaatcaacgatctaatacaaaatcatctgataatttagataattttaccaaaatactatttggtaagactccgtataaatcaacagaagttaataagcgtatagccatcgttaattatgcaaatttgaacgggtcccccttatcagttgaggacttggatgtttgttcggaggatgaaatagatagaatctataaaacgattaaacaatatcacgaaagtagaaaacgaaaaattatcgtcactaacgtgattattattgtcataaacattatcgagcaggcattgctaaaactcggatttgaagaaatcaaaggactgagtaccgatatcacttcagaaattatcgatgtggagatcggagatgactgcgatgctgtagcatctaaactaggaatcggtaacagtccggttcttaatattgtattgtttatactcaagatattcgttaaacgaattaaaattatttaatttaatacattcccatatccagacaacaatcgtctggattaatctgttcctgtcgtctcataccggacgacatattaatctttttattagtaggcatctttttagatggtttctttttcccagcattaactgagtcgatacctagaagatcgtgattgatctctccgaccattccacgaacttctaattggccgtctctgacggtaccataaactattttaccagcattagtaacagcttggacaatctgaccatccattgcgttgaatgatgtagttgctgttgttctacgtttaggagcaccagaagtatttttggagcccttggaggctgatgtagaagaagacgaggattttgatttacatgtaatacattttgtactctttgattttgtatcacatgcgccggcagtcacatttgtttgagaattaagattattgttgcctcctttgacggctgcatctccaccgatttgcgctagtagatttttaagctgtggtgtaatcttattaactgtttcgatataatcatcgtaactgcttctaacggctaaattttttttatccgccatttagaagctaaaaatatttttatttatgcagaagatttaactagattatacaatgaactaatatgatccttttccagattatttacaaacttggtattttttggttctggaggaggcgaatttaaattcggacttggattcggattttgtgagttcttgatcttattatacatcgagtataggatggcgacggtaactgctacgcaaataccgatcaacaaaagaataccaatcatttattgacaataacttcactattgatcaagtatgcaatatatcatcttttcactaaataagtagtaataatgattcaacaatgtcgagatatatggacgataataatttagttcatggaaatatcgctatgattggtatgaatgactccgctaactctgtggggtgcgcagtgctttccccacatagaataaattagcattccgactgtgataataataccaagtataaacgccataatactcaatactttccatgtacgagtgggactggtagacttactaaagtcaataaaggcgaagatacacgaaagaatcaaaagaatgattccagcgattagcacgccggaaaaataatttccaatcataagcatcatgtccatttaactaataaaaattttaaatcgccgaatgaacaaagtggaatataaaccatataaaaacaatagtttgtactgcaaaaataatatctatttttgttttcgaagatatggtaaaattaaatagtagtacacagcatgttataactaacagcagcaacggctcgtaattacttatcatttactagacgaaaaggtggtgggatattttcttgctcaaataatacgaatatatcacccatccattttatgcgatgtttatatactctaatctttaatagatctatagacgacgggtttaccaacaatatagattttatcgattcatctaatttaaacccttccttaaacgtgaatgatctattatctggcataacgatgactctacctgatgaatcggacaatgtactgggccatgtagaataaattatcaacgaattatcgtctacgaacatttatatcatttgttttaattttaggacgcgaataaatggatataaaatagaaaataacagatattacaaccaatgttatggccgcgcccaaccaggtaggcagttttattttatcttttactacaggttctcctggatgtacgtcaccaacggcggacgtagttctagtacaattagacgtaagttctgcttgggaattttttaacgctaaagagttaacgttaatcgtgcacccaacgtatttacatctagttctttgaacatcttgattataatataaccattttctatctctagattcgtcggtgcactcatgtaaccaacataccctaggtcctaaatatttatctccggaattagattttggataattcgcgcaccaacaatttctatttcctttatgatcgttacaaaagacgtataatgccgtatccccaaaagtaaaataatcaggacgaataattctaataaactcagaacaatatctcgcatccatatgtttggagcaaatatcggaataagtagacatagccggtttccgttttgcacgtaaccattctaaacaattggggtttccaggatcgtttctacaaaatccagtcatgaaatcatcacaatgttctgtcttgtaattattattaaatatttttggacagtgtttggtatttgtcttagaacaacattttgccacgctatcactatcgcccaggagataatccttttttataaaatgacatcgttgcccggatgctatataatcagtggcgtgttttaaatccttaatatattcaggagttacctcgttctgataatagattaatgatccaggacgaaatttgaaagaactacatggttctccatgaattaatacatattgtttagcaaattcaggaactataaaactactacaatgatctatcgacataccatctatcaaacaaaacttgggtttaatttctcccggagatgtttcataatagtacgtataactttcttctgcaaacttaacagctctattatattcaggataattaaaacctaattccatatatttgtctcgtatatctgctattcctggtgctattttaattctattaagagtaacggctgcccccattcttaataatcgtcagtatttaaactgttaaatgttggtatatcaacatctaccttatttcccgcagtataaggtttgttgcaggtatactgttcaggaatggttacatttatacttcttctatagtcctgtctttcgatgttcatcacatatgcaaagaacagaataaacaaaataatgtaagaaataatattaaatatctgtgaattcgtaaatacattgattgccataataattacagcagctacaatacatacaatagacattcccacagtgttgccattacctccacgatacatttgagttactaagcaataggtaataactaagctagtaagaggcaatagaaaagatgagataaatatcatcaatatagagattagaggagggctatatagagccaagacgaacaaaatcaaaccgagtaacgttctaacatcattatttttgaagattcccaaataatcattcattcctccataatcgttttgcattatacctccatctttaggcataaacgattgctgctgttcctctgtaaataaatctttatcaagcactccagcacccgcagagaagtcgtcaagcatattgtaatatcttaaataactcatttatatattaaaaaatgtcactattaaagatggagtataatctttatgccgaactaaaaaaaatgacttgtggtcaacccctaagtctttttaacgaagacggggatttcgtagaagttgaaccgggatcatcctttaagtttctgatacctaagggattttacgcctctccttccgtaaagacgagtctagtattcgagacattaacaacgaccgataataaaatcactagtatcaatccaacaaatgcgccaaagttatatcctcttcaacgcaaagtcgtatctgaagtagtttctaatatgaggaaaatgatcgaatcaaaacgtcctctatacattactcttcacttggcgtgtggatttggtaagactattaccacgtgttatcttatggctacacacggtagaaaaaccgtcatttgcgtacccaataaaatgttaatacatcaatggaagacacaggtagaggcagtcggattggaacataagatatctatagatggagtaagtagtctattaaaggaactaaagactcaaagtccggatgtattaatagtagtcagtagacatctgacaaacgatgccttttgtaaatatatcaataagcattatgatttgttcatcttggatgaatcacatacgtataatctgatgaacaatacagcagttacaagatttttagcgtattatcctccgatgatgtgttattttttaactgctacacctagaccagctaaccgaatttattgtaacagtattattaatattgccaagttatccgatctaaaaaaaactatctatgcggtagatagtttttttgagccatattccacagacaatattagacatatggtaaaacgactagatggaccatctaataaatatcatatatatactgagaagttattatctgtagacgagcctagaaatcaacttattcttgataccctggtagaagaattcaagtcaggaactattaatcgaattttagttattactaaactacgtgaacatatggtattcttctacaaacgattattagattttttcggatcagaggttgtatttataggagacgcccaaaatagacgtactccagatatggtcaaatcaatcaaggaactaaatagatttatattcgtatccaccttattttattccggtactggtttagatattcctagtttggattcgttgttcatttgctcggcagtaatcaacaatatgcaaatagagcaattactagggagggtatgtcgagaaacagaactattagataggacggtatatgtatttcctaacacatccatcaaagaaataaagtacatgataggaaatttcatgcaacgaattattagtctgtctgtagataaactaggatttaaacaaaaaagttatcggaaacatcaagaatccgatcccacttctgtatgtacaacatcctccagagaagaacgtgtattaaatagaatatttaactcgcaaaatcgttaagaagtttaagcgacgatccgcatgctgcgcaggccagtgtattacccctcatagtattaatataatccaatgatacttttgtgatgtcggaaatcttaaccaatttagactgacaggcagaacacgtcatgcaatcatcatcgtcatcgataactgtagtcttgggcttctttttgcggctcttcattccggaacgcacattggtgctatccatttaggtagtaaaaaataagtcagaatatgccctatagcacgatcgtgcaaaacctggtatatcgtctctatctttatcacaatatagtgtatcgacatttttattattattgacctcgtttatcttggaacatggaatgggaacatttttgttatcaacggccatctttgccttaattccagatgttgtaaaattataactaaacagtctatcatcgacacaaatgaaattcttgtttagacgtttgtagtttacgtatgcggctcgttcgcgtctcattttttcagatattgcaggtactataatattaaaaataagaatgaaataacataggattaaaaataaagttatcatgacttctagcgctgatttaactaacttaaaagaattacttagtctgtacaaaagtttgaaattttcagattctgcggctatagaaaagtataattctttggtagaatggggaacatctacttactggaaaataggcgtgcaaaaggtagctaatgtcgagacgtcaatatctgattattatgatgaggtaaaaaataaaccgtttaatattgatccgggatattacattttcttaccggtatattttggaagcgtctttatttattcgaagggtaaaaatatggtagaacttggatctggaaactcttttcaaataccagatgatatgcgaagtgcgtgtaacaaagtattagacagcgataacggaatagactttctgagatttgttttgttaaacaatagatggataatggaagatgctatatcaaaatatcagtctccagttaatatatttaaactagctagtgagtacggattaaacatacccaaatatttagaaattgaaatagaggaagacacattatttgacgacgagttatactctattatagaacgctctttcgatgataaatttccaaaaatatccatatcgtatattaagttgggagaacttagacggcaagttgtagactttttcaaattctcgttcatgtatattgagtccatcaaggtagatcgtataggagataatatttttattcctagcgttataacaaaatcaggaaaaaagatattagtaaaagatgtagaccatttaatacgatccaaggttagagaacatacatttgtaaaagtaaaaaagaaaaacacattttccattttatacgactatgatggaaacggaacagaaactagaggagaagtaataaaacgaattatagacactataggacgagactattatgttaacggaaagtatttctctaaggttggtagtgcaggcttaaagcaattgactaataaattagatattaatgagtgcgcaactgtcgatgagttagttgatgagattaataaatccggaactgtaaaacgaaaaataaaaaaccaatcagcatttgatttaagcagagaatgtttgggatatccagaagcggattttataacgttagttaataacatgcggttcaaaatagaaaattgtaaggttgtaaatttcaatattgaaaatactaattgtttaaataacccgagtattgaaactatatatggaaactttaaccagttcgtctcaatctttaatatcgtcaccgatgtcaaaaaaagattattcgagtgaaataatatgcgcctttgatataggtgcaaaaaatcctgccagaactgttttagaagtcaaggataactccgttagggtattggatatatcaaaattagactggagttctgattgggaaaggcgcatagctaaagatttgtcacaatatgaatacactacagttcttctagaacgtcagcctagaaggtcgccgtacgtcaaatttatctattttattaaaggctttttatatcatacatcggctgccaaagttatttgcgtctcgcctgtcatgtctggtaattcatatagagatcgaaaaaagagatcggtcgaagcatttcttgattggatggacacattcggattgcgagactccgttccggatagacgcaaattagacgatgtagcggatagtttcaatttggctatgagatacgtattagataaatggaatactaattatacaccttataataggtgtaaatctagaaattacataaaaaaaatgtaataacgttagtaacgccattatggataatctatttacctttctacatgaaatagaagatagatatgccagaactatttttaactttcatctaataagttgcgatgaaataggagatatatatggtcttatgaaagaacgcatttcctcagaggatatgtttgataatatagtgtataataaagatatacatcatgccattaagaaactagtgtattgcgacatccaacttactaaacacattattaatcagaatacgtatccggtatttaacgattcttcacaagtgaaatgttgtcattatttcgacataaactcagataatagcaatattagctctcgtacagtagagatatttgagagggaaaagtcatctcttgtatcatatattaaaactaccaataagaagagaaaggtcaattacggcgaaataaagaaaactgttcatggaggcactaatgcaaattacttttccggtaaaaagtctgacgagtatctgagtactacagttagatccaacattaatcaaccttggatcaaaaccatctctaagaggatgagagttgatatcattaatcactctatagtaacgcgtggaaaaagctctatattacaaactatagaaattatttttactaatagaacatgtgtgaaaatattcaaggattctactatgcacattattctatccaaggacaaggatgaaaaggggtgtatacacatgattgacaaattattctatgtctattataatttatttctgttgttcgaggatatcatccaaaacgagtactttaaagaagtagctaatgttgtaaaccacgtacttacggctacggcattagatgagaaattattcctaattaagaaaatggctgaacacgatgtttatggagttagcaatttcaaaatagggatgtttaacctgacatttattaagtcgttggatcataccgttttcccctctctgttagatgaggatagcaaaataaagttttttaaggggaaaaagctcaatattgtagcattacgatctctggaggattgtataaattacgtgactaaatccgagaatatgatagaaatgatgaaggaaagatcgactattttaaatagcatagatatagaaacggaatcggtagatcgtctaaaagaattgcttctaaaatgaaaaaaaacactgattcagaaatggatcaacgactcggatataagtttttggtgcctgatcctaaagccggagttttttatagaccgttacatttccaatatgtatcgtattctaattttatattgcatcgattgcatgaaatcttgaccgtcaagcggccactcttatcgtttaagaataatacagaacgaattatgatagaaattagcaatgttaaagtgactcctccagattactcacctataatcgcgagtattaaaggtaagagttatgacgcattagccacgttcactgtaaatatctttaaagaggtaatgaccaaagagggtatatccatcactaaaataagtagttatgagggaaaagattctcatttgataaaaattccgctactaataggatacgggaataaaaatccacttgatacagccaagtatcttgttcctaatgtcataggtggagtctttatcaataaacaatctgtcgaaaaagtaggaattaatctagtagaaaagattacaacatggccaaaatttagggttgttaagccaaactcattcactttctcgttttcctccgtatcccctcctaatgtattaccgacaagatatcgccattacaagatatctctggatatatcacaattggaagcgtcgaatatatcatcgacaaagacatttataacggtcaatattgttttgctgtctcaatatttatctagagtgagtctagaattcattagacgtagcttatcatacgatatgcctccagaagttgtctatctagtaaacgcgataatagatagtgctaaacgaattactgaatctattactgactttaatattgatacatacattaatgacctggtggaagctgaacacattaaacaaaaatctcagttaacgatcaacgagttcaaatatgaaatgctgcataactttttacctcatatgaactatacacccgatcaactaaagggattttatatgatatctttactaagaaagtttctctactgtatctaccacacttctagatatccagatagagattcgatggtttgtcatcgtatactaacatacggcaaatattttgagacgttggcacatgatgaattagagaattacataggcaacatccgaaacgatatcatgaacaatcacaagaacagaggcacttacgcggtaaacattcatgtactaacaactcctggacttaatcatgcattttctagtctattgagtggaaagttcaaaaagtcagacggtagttatcgaacacatcctcactattcatggatgcagaatatttctattcctaggagtgttggattttatccggatcaagtaaagatttcaaagatgttttctgtcagaaaataccatccaagtcaatatctttacttttgttcatcagacgttccggaaagaggtcctcaggtaggtttagtatctcaattgtctgtcttgagttccattacaaatatactaacgtctgagtatttggatttggaaaagaaaatttgtgagtatatcagatcatattataaagatgatataagttactttgaaacaggatttccaatcactatagaaaatgctctagtcgcatctcttaatccaaatatgatatgtgattttgtaactgactttagacgtagaaaacggatgggattcttcggtaacttggaggtaggtattactttagttagggatcacatgaatgaaattcgcattaatattggagcgggaagattagtcagaccattcttggttgtggataacggagagctcatgatggatgtgtgtccggagttagaaagcagattagacgacatgacattctctgacattcagaaagagtttccgcatgtcatcgaaatggtagatatagaacaatttacttttagtaacgtatgtgaatcggttcaaaaatttagaatgatgtcaaaggatgaaagaaagcaatacgatttatgtgactttcctgccgaatttagagatggatatgtggcatcttcattagtgggaatcaatcacaattctggacccagagctattcttggatgtgctcaagctaaacaagctatctcttgtctgagctcggatatacgaaataaaatagacaatggaattcatttgatgtatccagagaggccaatcgtgattagtaaggctttagaaacttcaaagattgcggctaattgcttcggccaacatgttactatagcattaatgtcgtacaaaggtatcaatcaagaggatggaattatcatcaaaaaacaatttattcagagaggcggtctcgatattgttacagccaagaaacatcaagtagaaattccattggaaaactttaataacaaagaaagagataggtctaacgcctattcaaaattagaaagtaatggattagttagactgaatgctttcttggaatccggagacgctatggcacgaaatatctcatcaagaactcttgaagatgattttgctagagataatcagattagcttcgatgtttccgagaaatataccgatatgtacaaatctcgcgttgaacgagtacaagtagaacttactgacaaagttaaggtacgagtattaaccatgaaagaaagaagacccattctaggagacaaatttaccactagaacgagtcaaaagggaacagtcgcgtatgtcgcggatgaaacggaacttccatacgacgaaaatggtatcacaccagatgtcattattaattctacatccatcttctctagaaaaactatatctatgttgatagaggttattttaacagccgcatattctgctaagccgtacaacaataagggagaaaaccgacctgtctgttttcctagtagtaacgaaacatccatcgatacatatatgcaattcgctaaacaatgttatgagcattcaaatccgaaattgtctgatgaagaattatcggataaaatcttttgtgaaaagattctctatgatcctgaaacggataagccttatgcatccaaagtattttttggaccaatttattacttgcgtctgagacatttaactcaggacaaggcaaccgttagatgtagaggtaaaaagacgaagctcattagacaggcgaatgagggacgaaaacgtggaggaggtatcaagttcggagaaatggagagagactgtttaatagcgcatggtgcagccaatactattacagaagttttgaaagattcggaagaagattatcaagatgtgtatgtttgtgaaaattgtggagacatagcagcacaaatcaagggtattaatacatgtcttagatgttcaaaacttaatctctctcctctcttaacaaaaattgataccacacacgtatctaaagtatttcttactcaaatgaacgccagaggcgtaaaagtcaaattagatttcgaacgaagacctccttcgttttataaaccattagataaagttgatctcaaaccgtcttttctggtctaatattgtttagtagatacttatcaacatcatcaagattatcaagattatcaagattatcaagataagctaattcactaaacacattatcgatttcggtatcgttactcgcagaataaagttcgttatgatcctgatattcggaaatctgtggagtttcaggttttggtggatgtgtaacagctacttgagataccgaagtctgatattcagaaagctgtggatgttctggttcggcatccaccgatggtgttacaccactactaattggttcagtaacgtctgtggacgatggaggcaccacttctacaggttctggttctttatcctcagtcatcaacggagctacttcaatgcgaggaaatgtataatttggtaatggtttctcatgtggatctgaagaagaggtaagatatctactagaaagataccgatcacgttctagttctcttttgtagaacttaactttttctttctcagcatctagttgatattccaacctcttcacgttactacgttcagatttcaattcacgttcgcatgggttacctccgcagtttttacgagcgatttcacgttcagccttcatgcgtctctccctctctctatcgagtttatcagagcagtctttctgaaggcgatcgaactccataaatttctccaacgctttgattgtttccatagatttccgaagttcagcttttaggactgtgattctttttctttcgaattcacagctggatgtacaaccgtttccattaccgccatctctaagtttcttttctagatcggcaacatttcatccccatgccttttacattcctcgagtctactgtcgtcgaaatatcgttccagctccttttcgacatcaataactttagcacgttgtctctcaagctctcttttgtagttatctgattccctggcacgtttaagatcttcatgcaattgagtcagctcttaacacaatctcttgcttcttcgtcatagtacgcgcaatcactgtgagatccattgttaccacgtctacactcggcgagctcgcgtttaagagattcaatttcccgtttgtattggtccatgtttccattgctaccaccattagatttacaggctgctagttgtcgttcgagatcagaaatacgggttttcttggaattgatttcgtcgatgtacttggcatcgaaacacttattaagttctttttccaattctacgattttatttctttcgcgagtcaattccctcctgtagtaactatctgttttgtcagattcacgctctctacgtagactttcttgcaagttactaatttgttccctagcacgtccgagtttagttttatatgctgaatagagttctgattcatcctttgagcagatctctagcgatcgtttaagattcctgattctagtctttagcctatttacctcctcagaagatgttccgttaccgttgcgtttacactcgttaagctgtctatcaagatccatgattctatctctaagacgttgcatctctctttccatatcagcattgctttcattattacgtctgcagtcactcaactgtctttcaatatctgagattctatctctaagacgtcgcatctctctctgtttcggcattggtttcattattacgtctacagtcgttcaactgtctttcaagatctgatattctagattggagtctgctaatctctgtagcattttcacggcattcactcagttgtctttcaagatctgaaattttagattggagtctgctaatctctgtaagatttcctcctccgctctcgatgcagtcggtcaacttattctctagttctctaatacgcgaacgcagtgcatcaacttcttgcgtgtcttcctggttgcgtgtacattcatcgagtctagattcgagatctctaacgcgtcgtcgttcttcctcaagttctctgcgtactacagaaagcgtgtccctatcttgttgatatttagcaatttctgattctagagtactgattttgcttacgtagttactaatatttgtcttggccttatcaagatcctccttgtatttgtcgcattccttgatatccctacgaagtctggacagttcccattcgacattacgacgtttatcgatttcagctcggagatcgtcatcgcgttgttttagccacatacgactgagttcaagttctcgttgacaagatccatctacttttccattcctaatagtatccagttccttttctagttctgaacgcatttctcgttccctatcaagcgattctctcaattctcggatagtcttcttatcaatttctaataaatctgaaccatcatctgtcccattttgaatatccctgtgttctttgatctcttttgtaagtcggtcgattctttcggttttataaacagaatccctttccaaagtcctaatcttactgagtttatcactaagttctgcattcaattcggtgagttttctcttggcttcttccaactctgttttaaactctccactatttccgcattcttcctcgcatttatctaaccattcaattagtttattaataactagttggtaatcagcgattcctatagccgttcttgtaattgtgggaacataattaggatcttctaatggattgtatggcttgatagcatcatctttatcattattagggggatggacaaccttaattggttggtcctcatctcctccagtagcgtgtggttcttcaatagccgtgttagtaataggcttaggcaaatgcttgtcgtacgcgggcacttcctcatccatcaagtatttataatcgggttctacgtctgaatattcttttctaagagacgcaacttctggagttagtagaagaactctgtttctatatctatcaacgctggaatcaatactcaagttaaggatagcgaatacctcatcgtcatcatccgtatcctctgaaacgccatcatatgacatttcatgaagtctaacgtattgataaacagaatcagatttagtattaaacagatccttaacctttttagtaaatgcatatgtatattttagatctccagatttcataatatggtcgcatgccttaaatgtcagtgcttccataatatagtctggaacactaattggtgatgaaaaagataccggaccatatgctacgttgataaataactctgagccactaactagataatgattaatgttaaggaagaggaaatattcagtgtataggtatgtcttggcgtcatatcttgtactaaacacgctaaacagtttgttaatgtgatcaatttccaatagattaattagagcagcaggaataccaacaaacatattaccacatccgtattttctatgaatatcacatatcatgttaaaaaatcttgatagaagagcgaatatctcgtctgacttaatgagtcgtagttcagcagcaacataagtcataactgtaaatagaacatactttcctgtagtgttgattctagactccacatcaacaccattattaaaaatagttttatatacatctttaatctgctctccgttaatcgtcgaacgttctagtatacggaaacactttgatttcttatctgtagttaatgacttagtgatatcacgaagaatattacgaattacatttcttgtttttcttgagagacctgattcagaactcaactcatcgttccatagtttttttacctcagtggcgaaatctttggagtgcttggtacatttttcaataaggttcgtgacctccatttattataaaaaaattttattcaaaacttaactacaatcgggtaattataaaatcgtagatctcccatgtggtggaatactaccatctatcgcatgtggatggacagtaggtaatggccatgggaacagtaatgtttgcatatttatctttcttgccagtattactgcatattgtcccaatgtttcgatgtgatgttctaacctatcaactgccgctgtatcacaacaatagtgtccgatgaaattaagattatgatccaatgtgtttaatatatgattatcaagtcttatacgatccgcgtcttttttgacaggatcaggttcttctacaggaagaagtttcggcctcttatgatattcatgtctgggaaacggtggtctagggtgaggctccggtatcggagtgggttttggattataatcatcatcgtctatgacatcatcttcgacttcgatatttattttgctatcttgatgatgtcctgtatcagttgcattttcagcactcgactgaatattagcgcattcattgtttattattaccatatttctaaacccaaaatgtatatgttgaacatcagtactatcgttgatgagtcttatagcatgaattcgcttatcgttatcgggtttagcttctgtcaccttagcaattccttttttattaaactctacataatcatatccatttctattgtttgttctaatataaacgagtatagcatcattgctaaatttttcaatagtatcgaaaacagaatatcctaaaccatataatatatattcaggaacactcaaactaaatgtccaggattctcctaaatacgtaaactttaatagtgcgaaatcattcaaaaatctaccacttatagatagatagtacataaatgcgtatagtagtctacctatctctttattatgaaaaccggcattacgatcatatatgtcgtgatatacctgtgatccgtttacgttaaaccataaatacatgggtgatcctataaacatgaatttatttctaattctcagagctatagttaattgaccgtgtaatatttgcttacatgcatacttgatacgctcattaataagatttttatcattgctcgttatctcagaatcgtatatataaggagtaccatcgtgattcttaccagatattatacaaaatactatatataaaatatattgaccaacgttagtaatcatataaatgtttaacgttttaaattttgtattcaatgatccattatcatacgctagcatggtcttatgatattcattctttaaaatataatattgtgttagccattgcattggggctcctaatggagattttttattctcatccattttaggataggctttcataaagtccctaataacttcgtgaataatgtttctatgttttctactgatgcatgtatttgcttcgatttttttatcccatgtttcatctatcatagatttaaacgcagtaatgctcgcaacattaacatcttgaaccgttggtacaattccgttccataaatttataatgttcgccatttatataactcattttttgaatatacttttaattaacaaaagagttaagttactcatatggacgccgtccagtctgaacatcaatctttttagccagagatatcatagccgctcttagagtttcagcgtgattttccaacctaaatagaacttcatcgttgcgtttacaacacttttctatttgttcaaactttgttgttacattagtaatctttttttccaaattagttagccgttgtttgagagtttcctcattgtcgtcttcatcggctttaacaattgcttcgcgtttagcctctggctttttagcagcctttgtagaaaaaaattcagttgctggaattgcaagatcgtcatctccggggaaaagagttccgtccatttaaagtacagattttagaaactgacactctgcgttatttatatttggtacaacacatggattataaatattgatgttaataacatcagaaaatgtaaagtctatacattgttgcatcgtgttaaattttctaatggatctagtattattgggtccaacttctgcctgaaatccaaatatggaagcggatacaaaaccgtttcctggataaaccacacatctccacttttgctttacatcagaaattgtgtcattgacatcttgaactctcctatctaatgccggtgttccacctatagattttgaatattcgaatgctgcatgagtagcattaaattccttaatattgccataattttcatatattgagtaaccctggataaaaagtaaacacaccgcagccgtcgctaccacaataaaaaaaattgatagagagttcatttataatctattagaagctgacaaaatttttttacacgcatcagacaatgctttaataaatagttcaacatctacttttgtcatatcgaaccgatggtatgattctaacctagaattacatccgaaaaagttgactatgttcatagtcattaagtcattaacaaacaacattccagactctggattataagacgatactgtttcgtcacaattacctaccttaatcatgtgattatgaatattggctattagagcaccttctaagaaatctataatatctttgaaacacgatttaaaatcaaaccacgaatatacttctacgaagaaagttagtttacccataggagaaataactataaatggagatctaaatacaaaatccggatctatgatagttttaacattattatattctctattaaatacctccacatctaaaaatgttaattttgaaactatgtcttcgtttattaccgtacctgaactaaacgctataagctctattgtttgagaactctttaaacgatattcttgaaatacatgtaacaaagtttcctttaactcggtcggtttatctaccatagttacagaatttgtatccttatctataatataataatcaaaatcgtataaagttatataattatcgcgttcagattgtgatcttttcaaatagactaaaaaccccatttctctagtaagtatcttatgtatatgtttgtaaaatatcttcatggtgggaatatgctctaccgcagttagccattcctcattgacagcggtagatgtattagacaaaactattccaatgtttaacaagggccattttacgagattattaaatccttgtttgataaatgtagccaatgagggttcgagttcaacgacgattgaattctcttcccgcggatgctgcatgatgaacgacgggatgttgttcgattgatttggaattctttttcgactttttgtttatattaaatattttaaaatttatagctgatagcaattcatgtactacggataatgtagacgcgtattgcgcatcgatatctttattattagataaatttatcaataaatgtgagaagtttgcctcgttaaggtcttccatttaaatattatataaacatttgtgtttgtatcttattcgtcttttatggaatagttttttactagtaaagctgcaattacacactttgtccgtaaaacataaatataaacaccagcttttatcaatcgttccaaaaagtcgacggcggacatttttaacatggcatctattttaaatacacttaggtttttggaaaaaacatcattttataattgtaacgattcaataactaaagaaaagattaagattaaacataagggaatgtcatttgtattttataagccaaagcattctaccgttgttaaatacttgtctggaggaggtatatatcatgatgatttggttgtattggggaaggtaacaattaatgatctaaagatgatgctattttacatggatttatcatatcatggagtgacaagtagtggagcaatttacaaattgggatcgtctatcgatagactttctctaaataggactattgttacaaaagttaataattatgatgatacattttttgacgacgatgattgatcgctattgcacaattttgtttttttactttctaatatagcgtttagattctttttcatgtgcgaatattgatttactaaaatatcgatgtttaacttttgttctatgacgtccttatcagcggtatcggtacatatacgtaattcaccttcacaaaatacggagtcttcgataataatagccaatcgattattggatctagcggtctgtatcatattcaacatgtttaatatatcctttcgtttcccctttacaggcatcgatcgtagcatattttccgcgtctgagatggaaatgttaaaactacaaaaatgcgtaatgttagcccgtcctaatattggtacgtgtctataagtttggcatagtagaataatagacgtgtttaaatgccttccaaagtttaagaattctattagagtattgcattttgatagtttatcgcctacatcatcaaaaataagtaaaaagtgtgctgattttttatgattttgtgcgacagcaatacatttttctatgttacttttagttcgtatcagattatattctagagattcctgactactaacgaaattaatatgatttggccaaatgtatccatcataatctggattataaacgggtgtaaacaagaatatatgtttatattttttaactagtgtagaaaacagagatagtaaatagatagtttttccagatccagatcctcccgttaaaaccattctaaacggcatttttaataaattttctcttgaaaattgtttttcttggaaacaattcataattatatttacagttactaaattaatttgataataaatcaaaatatggaaaactaaggtcgttagtagggaggagaacaaagaaggcatatcgtgatataaataacatttattatcatgatgacaccagaaaacgacgaagagcagacatctgtgttctccgctactgtttacggagacaaaattcagggaaagaataaacgcaaacgcgtgattggtctatgtattagaatatctatggttatttcactactatctatgattaccatgtccgcgtttctcatagtgcgcctaaatcaatgcatgtctgctaacgaggctgctattactgacgccgctgttgccgttgctgctgcatcatctactcatagaaaggttgcgtctagcactacgcaatatgatcacaaagaaagctgtaatggtttatattaccagggttcttgttatatattacattcagactaccagttattctcggatgctaaagcaaattgcactgcggaatcatcaacactacccaataaatccgatgtcttgattacctggctcattgattatgttgaggatacatggggatctgatggtaatccaattacaaaaactacatccgattatcaagattctgatatatcacaagaagttagaaagtatttttgtgttaaaacaatgaactaatatttatttttgtacattaataaatgaaatcgcttaatagacaaactgtaagtaggtttaagaagttgtcggtgccggccgctataatgatgatactctcaaccattattagtggcataggaacatttctgcattacaaagaagaactgatgcctagtgcttgcgccaatggatggatacaatacgataaacattgttatctagataccaacattaaaatgtctacagataatgcggtttatcagtgtcgtaaattacgagctagattgcctagacctgatactagacatctgagagtattgtttagtattttttataaagattattgggtaagtttaaaaaagaccaataataaatggttagatattaataatgataaagatatagatattagtaaattaacaaattttaaacaactaaacagtacgacggatgctgaagcgtgttatatatacaagtctggaaaactggttgaaacagtatgtaaaagtactcaatctgtactatgtgttaaaaaattctacaagtgacaacaaaaaatgaattaataataagtcgttaacgtacgccgccatggacgccgcgtttgttattactccaatgggtgttgactataacagatacattgtatgatgatctcgatatctcaatcatggactttataggaccatacattataggtaacataaaaactgtccaaatagatgtacgggatataaaatattccgacatgcaaaaatgctactttagctataagggtaaaatagttcctcaggattctaatgatttggctagattcaacatttatagcatttgtgccgcatacagatcaaaaaataccatcatcatagcatgcgactatgatatcatgttagatatagaagataaacatcagccattttatctattcccatctattgatgtttttaacgctacaatcatagaagcgtataacctgtatacagctggagattatcatctaatcatcaatccttcagataatctgaaaatgaaattgtcgtttaattcttcattctgcatatcagacggcaatggatggatcataattgatgggaaatgcaatagtaattttttatcataaaagttgtaaagtaaataataaaacaataaatattgaactagtagtacgtatattgagcaatcagaaatgatgctggtacctcttatcacggtgaccgtagttgcgggaacaatattagtatgttatatattatatatttgtaggaaaaagatacgtactgtctataatgacaataaaattatcatgacaaaattaaaaaagataaagagttctaattccagcaaatctagtaaatcaactgatagcgaatcagactgggaggatcactgtagtgctatggaacaaaacaatgacgtagataatatttctaggaatgagatattggacgatgatagcttcgctggtagtttaatatgggataacgaatccaatgttatggcgcctagcacagaacacatttacgatagtgttgctggaagcacgctgctaataaataatgatcgtaatgaacagactatttatcagaacactacagtagtaattaatgaaacggagactgttaaagtacttaatgaagataccaaacagaatcctaactattcatccaatcctttcgtaaattataataaaaccagtatttgtagcaagtcaaatccgtttattacagaacttaacaataaatttagtgagaataatccgtttagacgagcacatagcgatgattatcttaataagcaagaacaagatcatgaacacgatgatatagaatcatcggtcgtatcattggtgtgattagtttcctttttataaaattgaagtaatatttagtattattgctgccgtcacgttgtacaaatggagatattccctgtattcggcatttctaaaattagcaattttattgctaataatgactgtagatattatatagatacagaacatcaaaaaattatatctgatgagatcaatagacagatggatgaaacggtacttcttaccaacatcttaagcgtagaagttgtaaatgacaatgagatgtaccatcttattcctcatagattatcgacgattatactctgtattagttctgtcggaggatgtgttatctctatagataatgacgtcaatggcaaaaatattctaacctttcccattgatcatgctgtaatcatatccccactgagtaaatgtgtcgtagttagcaagggccctacaaccatactggttgctaaagcggatatacccagcaaacgattggtaacatcgtttacaaacgacatactgtatgtaaacaatctatcactgattaattatttgccgttgtctgtattcattattagacgagtcaccgactatttggatagacacatatgcgatcagatatttgctaataataagtggtattcccttataaccatcgacgataagcaatatcctattccatcaaattgtataggtatgtcttctgccaagtacataaattctagcatcgagcaagatactttaatacatgtttgtaacctcgagcatccattcgacttagtatacaaaaaaatgcagtcgtacaattctgtacctatcaaggaacaaatattgtacggtagaattgataatataaatatgagcattagtatttctgtggattaatagatttctagtatggggatcattaatcatctctaatctctaaatacctcataaaacgaaaaaaaagctattatcaaatactgtacggaatagattcattctcttctctttttatgaaactctgttgtatatctactgataaaactggaagcaaaaaatctgataaaaagaataagatcaagatcaaggattatatggaacacgattattataaaataacaatagttcctggttcctcttccacgtctactagctcgtggtattatacacatgcctagtaatagtctctttgcgttgatggaaagcagactagaaataacaggctaaaatgttcagacaccataatagttcccaacccagataataacagagtaccatcaacacattcctttaaactcaatcccaaacccaaaaccgttaaaatgtatccggccaattgatagtagataatgaggtgtacagcgcatgataatttacacagtaaccaaaatgaaaatactttagtaattataagaaatatagatggtaacgtcatcatcaacaatccaataatatgccggagagtaaacattgacggataaaacaaaaatgctccgcataactctatcatggcaataacacaaccaaatacttgtaagattcctaaattagtagaaaatacaacggatatcgatgtataagtgatctcgagaaataataagaataaagtaatgcccgtaaagataaacatcaacattgtttggtaatcattaaaccaattagtatgacgttgaactaatttcacagtaaattttattccagtattatccccgcatgtataagtacctggtaagatatctttatattccataatcaatgagacatcactatctgataacgaatgaagtctagcactagtatgccatttacttaatattgtcgtcttggaagttttattataagttaaaatatcatggttatccaatttccatctaatatactttgtcggattatctatagtacacggaataatgatggtatcattacatgctgtatactctatggtctttgtagttgttataacaaccaacgtatagaggtatatcaacgatattctaactcttgacattttttatttatttaaaatgatacctttgttatttattttattctattttgctaacggtattgaatggcataagtttgaaacgagtgaagaaataatttctacttacttattagacgacgtattatacacgggtgttaatggggcggtatacacattttcaaataataaactaaacaaaactggtttaactaataataattatataacaacatctataaaagtagaggatgcggataaggatacattagtatgcggaaccaataacggaaatcccaaatgttggaaaatagacggttcagacgacccaaaacatagaggtagaggatacgctccttatcaaaatagcaaagtaacgataatcagtcacaacggatgtgtactatctgacataaacatatcaaaagaaggaattaaacgatggagaagatttgacggaccatgtggttatgatttattcacggcggataacgtaattccaaaagatggtttacgaggagcattcgtcgataaagacggtacttatgacaaagtttacattcttttcactgatactatcggctcaaagagaattgttaaaattccgtatatagcacaaatgtgcctaaacgacgaaggtggtccatcatcgttgtctagtcatagatggtcgacgtttctcaaagtcgaattagaatgtgatatcgacggaagaagttatagataaattattcattctaaaactataaaaacagataatgatacgatactatatgtattcttcgatagtccgcattatgtacctattctatgaataccattaaacaatctttttctacgtcaaaattggaaggatatacaaagcaattgccgtctccagctcctggtatatgtctaccagctggaaaagttgttccacataccacgtttgaagtcatagaaaaatataatgtactagatgatattataaagcctttatctaaccaacctatcttcgaaggaccgtctggtgttaaatggttcgatataaaggagaaggaaaatgaacatcgggaatatagaatatacttcataaaagaaaattctatatattcgttcgatacaaaatctaaacaaactcgtagctcgcaagtcgatgcgcgactattttcagtaatggtaacttcgaaaccgttatttatagcagatatagggataggagtaggaatgccacaaatgaaaaaaatacttaaaatgtaatcttaatcgagtacaccacacgacaatgaacaaacataagacagattatgctggttatgcttgctgcgtaatatgcggtctaattgttggaattatttttacagcgacactattaaaagttgtagaacgtaaattagttcatacaccatcaatagataaaacgataaaagatgcatatattagagaagattgtcctactgactggataagctataataataaatgtatccatttatctactgatcgaaaaaacctgggaggaaggacgtaatgcatgcaaagctctaaatccaaattcggatctaattaagatagagactccaaacgagttaagttttttaagaagccttagacgaggctattgggtaggagaatccgaaatattaaaccagacaaccccatataattttatagctaaaaatgccacgaagaatggaactaaaaaacggaaatatatttgtagtacaacgaatactcccaaactgcattcgtgttacactatataacaattacactacatttttatcataacactacttcggttagatgttttagaaaaaaataaatatcgccgtaccgttcttgtttttataaaaataacaattaacaattatcaaattttttctttaatattttacgtggttgaccattcttggtggtaaaataatctcttagtgttggaatggaatgctgtttaatgtttccgcactcatcgtatattttgacgtatgcagtcacatcgtttacgcaatagtcagactgtagttctatcatgcttcctacatcagaaggaggaacagttttaaagtctcttggttttaatctattgccattagttttcatgaaatcctttgttttatccacttcacattttaaataaatgtccactatacattcttctgttaattttactagatcgtcatgggtcatagaatttataggttccgtagtccatggatccaaactagcaaacttcgcgtatacggtatcgcgattagtgtatacaccaactgtatgaaaattaagaaaacagtttaataaatcaacagaaatatttaatcctccgtttgatacagatgcgccatatttatggatttcggattcacacgttgtttgtctgaggtgttcgtctagtgttgcttctacgtaaacttcgattcccatatattctttattgtcagaatcgcataccgatttatcatcatacactgtttgaaaactaaatggtatacacatcaaaataataaataataacgagtacattctgcaatattgttatcgtaattggaaaattagtgttcgagtgagtcggattatgtgagtactggattgtatattttattttatattttgtaataagaataaaatgctaatgtcaagtttattccaatagatgtcttattaaaaaacatatataataaataacaatggctgaatggcataaaattatcgaggatatctcaaaaaataataagttcgaggatgccgccatcgttgattacaagactacaaagaatgttctagctgctattcctaacagaacatttgccaagattaatccgggtgaaattattcctctcatcactaatcgtaatattctaaaacctcttattggtcagaaatattgtattgtatatactaactctctaatggatgagaacacgtatgctatggagttgcttactgggtacgcccctgtatctccgatcgttatagcgagaactcataccgcacttatatttttgatgggtaagccaacaacatccagacgtgatgtgtatagaacgtgtagagatcacgctacccgtgtacgcgcaactggtaattaaaataaaaagtaatattcatatgtagtgtcaattttaaatgatgatgatgaaatggataatatccatattgacgatgtcaataatgccggtattggcatacagctcatcgatttttagatttcattcagaggatgtggaattatgttatgggcatttgtattttgataggatctataatgtagtaaatataaaatataatccgcatattccatatagatataattttattaatcgcacgttaaccgtagatgaactagacgataatgtcttttttacacatggttattttttaaaacacaaatatggttcacttaatcctagtttgattgtctcattatcaggaaacttaaaatataatgatatacaatgctcagtaaatgtatcgtgtctcattaaaaatttggcaacgagtacatctactatattaacatctaaacataagacttattctctacatcggtccacgtgtattactataataggatacgattctattatatggtataaagatataaatgacaagtataatgacatctatgattttactgcaatatgtatgctaatagcgtctacattgatagtgaccatatacgtgtttaaaaaaataaaaatgaactcttaattatgctatgctattagaaatggataaaatcaaaattacggttgattcaaaaattggtaatgttgttaccatatcgtataacttggaaaagataactattgatgttacacctaaaaagaaaaaagaaaaggatgtattattagcgcaatcagttgctgtcgaagaggcaaaagatgtcaaggtagaagaaaaaaatattatcgatattgaagatgacgatgatatggatgtagaaagcgcataatacgatctataaaaataagtatataataaatactttttatttacggtactcttgtagtggtgataccctactcaattatttttttaaaaaaatacttattctgattcttctagccatttccgtgttcgttcgaatgccacatcgacgttaaagataggggagtagttgaaatctagttctgcattgttggtacgcacctcaaatgtagtgttggatatcttcaacgtatagttgttgagtagtgatggttttctaaatagaattctcttcatatcattcttgcacgcgtacatttttagcatccatcttggaattctagatccttgttctattcccaatggtttcatcaatagaagattaaacatatcgtacgaacacgatggagagtaatcgtagcaaaagtaagcatttcctttaatcttagatcccggatactggatatattttgcagccaacacgtgcatccatgcagcatttcctacatatacccggctatgcaccgcgtcatcatcgactgtacgatacataatgttaccgtgttgcttacattgctcgtaaaagactttcgtcaatttgtctccttctccgtaaattccagtgggtcttaggcaacaagtatacaattttgctccattcatgattacggaattattggctttcataaccagttgctcggccatacgtttactttttgcgtatacatgtcctggtgatatatcataaagggtatgctcatggccgatgaatggatcaccgtgtttattgggtcctattgcttccatgctactagtatagatcaaatacttgattcctaggtccacacaagctgccaatatagtctgtgttccataatagtttactttcatgatttcattatcggtgtattttccaaatacatccactagagcagccgtatgaataatcagatttaccccatctagcgcttctctcaccttatcaaagtcgtttatatcacattgtatatagtttataaccttaactttcgaggttattggttgtggatcttctacaatatctatgactctgatttcttgaacatcatctgcactaattaacagttttactatatacctgcctagaaatccggcaccaccagtaaccgcgtacacggccattgctgccactcataatatcagactacttattctattttactaaataatggctgtttgtataatagaccacgataatatcagaggagttatttactttgaaccagtccatggaaaagataaagttttaggatcagttattggattaaaatccggaacgtatagtttgataattcatcgttacggagatattagtcaaggatgtgattccataggcagtccagaaatatttatcggtaacatctttgtaaacagatatggtgtagcatatgtttatttagatacagatgtaaatatatttacaattattggaaaggcgttatctatttcaaaaaatgatcagagattagcgtgtggagttattggtatttcttacataaatgaaaagataatacattttcttacaattaacgagaatggcgtttgatatatcagttaatgcgtctaaaacaataaatgcattagtttacttttctactcagcaaaataaattagtcatacgtaatgaagttaatgatacacactacactgtcgaatttgatagggacaaagtagttgacacgtttatttcatataatagacataatgacaccatagagataagaggggtgcttccagaggaaactaatattggttgcgcggttaatacgccggttagtatgacttacttgtataataagtatagttttaaactgattttagcagaatatataagacacagaaatactatatccggcaatatttattcggcattgatgacactagatgatttggctattaaacagtatggagacattgatctattatttaatgagaaacttaaagtagactccgattcgggactatttgactttgtcaactttgtaaaggatatgatatgttgtgattctagaatagtagtagctctatctagtctagtatctaaacattgggaattgacaaataaaaagtataggtgtatggcattagccgaacatatatctgatagtattccaatatctgagctatctagactacgatacaatctatgtaagtatctacgcggacacactgagagcatagaggatgaatttgattattttgaagacgatgattcgtctacatgttctgccgtaaccgacagggaaacggatgtataattttttttatagcgtgaaggatatgataaaaaatataattgttgtatttatcccattccaatcaccttatatgattctgtaaaaaaattatactgtaacacaataaaggagtcttatagatgtatagaggtcagatactggtttgataaactgtttattccacataagtatgtttgactttatggttagacccgcatactttaacaaatcactgaaaattggagttaggtattgacctctcagaatcagttgccgttctggaacattaaatgtattttttatgatatactccaacgcatttatgtgggcatacaacaagtcattactaatggagtattccaagagttttagttgtctagtatttaacaagagaagagatttcaacagactgtttatgaactcgaacgccgcctcattgtcgcttatattgatgatgtcgaattctcccaatatcatcactgatgagtagctcatcttgttatcgggatccaagttttctaaagatgtcattaaaccctcgatcatgaatggatttatcatcatcgtttttatgttggacatgagcttagtccgtttgtccacatctatagacgacgatttctgaattatttcatatatccctctctttaactccaggaacttgtcaggatggtctactttaatatgttctcgtctaagagatgaaaatctttggatggttgcacgcgacttttctttaaaggatgacgttgcccaagatcctctcttaaatgaatccatcttatccttggacaagatggacagtctattttccttagatggtttaatatttttgttacccatgatctataaaggtagacctaatcgtctcggatgaccatatatttattttcagttttattatacgcataaattgtaaaaaatatgttaggtttacaaaaatgtctcgtggggcattaatcgtttttgaaggattggacaaatctggaaaaacaacacaatgtatgaacatcatggaatctataccggcaaacacgataaaatatcttaactttcctcagagatccactgtcactggaaagatgatagatgactatctaactcgtaaaaaaacctataatgatcatatagttaatctattattttgtgcaaatagatgggagtttgcatcttttatacaagaacaactagaacagggaattactttaatagttgatagatacgcattttctggagtagcgtatgccgccgctaaaggcgcgtcaatgactctcagtaagagttatgaatctggattgcctaaacccgacttagttatattcttggaatctggtagcaaagaaattaatagaaacgtcggcgaggaaatttatgaagatgttacattccaacaaaaggtattacaagaatataaaaaaatgattgaagaaggagatattcattggcaaattatttcttctgaattcgaggaagatgtaaagaaggagttgattaagaatatagttatagaggctatacacacggttactggaccagtggggcaactgtggatgtaatagtgaaattacattttttataaatagatgttagtacagtgttataaatggatgaagcatattactctggcaacttggaatcagtactcggatacgtgtccgatatgcataccgaactcgcatcaatatctcaattagttattgccaagatagaaactatagataatgatatattaaacaaggacattgtaaattttatcatgtgtagatcaaacttggataatccatttatctctttcctagatactgtatatactattatagatcaagagatctatcagaccgaattgattaattcattagacgacaatgaaattatcgattgtatagttaacaagtttatgagcttttataaggataacctagaaaatatagtagatgctatcattactctaaaatatataatgaataatccagattttaaaactacgtatgccgaagtactcggttccagaatagccgatatagatattaaacaagtgatacgtaagaatatactacaattgtctaatgatatccgcgaacgatatttgtgaaaaatattaaaaaaaaatactttttttattaaatgacgtcgcttcgcgaatttagaaaattatgctgtgatatatatcacgcatcaggatataaagaaaaatctaaattaattagagactttataacagatagggatgataaatatttgatcattaagctattgcttcccggattagacgatagaatttataacatgaacgataaacaaattataaaattatatagtataatatttaaacaatctcaggaagatatgctacaagatttaggatacggatatataggagacactattaggactttcttcaaagagaacacagaaatccgtccacgagataaaagcattttaactttagaagaagtggatagttttttaactacgttatcatccgtaactaaagaatcgcatcaaataaaattattgactgatgtagcatctgtttgtacatgtaatgatttaaaatgtgtagtcatgcttattgataaagatctaaaaattaaagcgggccctcggtacgtacttaacgctattagtcctcatgcctatgatgtgtttagaaaatctaataacttgaaagagataatagaaaatgcatctaaacaaaatctagactctatatctatttctgttatgactccaattaatcccatgttagcggaatcgtgtgattctgtcaataaggcgtttaaaaaatttccatcaggaatgtttgcggaagtcaaatacgatggtgaaagagtacaagttcataaaaataataacgagtttgccttctttagtagaaacatgaaaccagtactctctcataaagtggattatctcaaagaatacataccgaaagcatttaaaaaagctacgtctatcgtattggattctgaaattgttcttgtagacgaacataatgtaccgctaccgtttggaagtttaggaatacacaaaaagaaagaatataaaaactctaacatgtgtttgttcgtgtttgactgtttgtactttgatggattcgatatgacggacattccattgtacgaacgaagatcttttctcaaagatgttatggttgaaatacccaatagaatagtattctcagagttgacgaatattagtaacgagtctcagttaactgacgtattggatgatgcactaacgagaaaattagaaggattggtcttaaaagatattaatggagtatacgaaccgggaaagagaagatggttaaaaataaagcgagactatttgaacgagggttccatggcagattctgccgatttagtagtactaggtgcctactatggtaaaggagcaaagggtggtatcatggcagtctttctaatgggttgttacgacgatgaatccggtaaatggaagacggttaccaagtgttcaggacacgatgataatacgttaagggagttgcaagaccaattaaagatgattaaaattaacaaggatcccaaaaaaattccagagtggttagtagttaataaaatctatattcccgattttgtagtagaggatccgaaacaatctcagatatgggaaatttcaggagcagagtttacatcttccaagtcccataccgcaaatggaatatccattagatttcctagatttactaggataagagaggataaaacgtggaaagaatctactcatctaaacgatttagtaaacttgactaaatcttaatagttacatacaaactgaaaattaaaataacaccatttagttggtggtcgccatggatggtgttattgtatactgtctaaacgcgttagtaaaacatggcgaggaaataaatcatataaaaaatgatttcatgattaaaccatgttgtgaaagagtttgtgaaaaagtcaagaacgttcacattggcggacaatctaaaaacaatacagtgattgcagatttgccatatatggataatgcggtatccgatgtatgcaattcactgtataaaaagaatgtatcaagaatatccagatttgctaatttgataaagatagatgacgatgacaagactcctactggtgtatataattattttaaacctaaagatgttattcctgttatcatatctataggaaaggataaagatgtctgtgaactattaatctcatcagacatatcgtgtgcatgcgtggagttaaattcatatcacgtagccattcttcccatgaatgtttccttttttaccaaaggaaatgcctcgttgattattctcctgtttgatttctctatcgatgcagcacctctcttaagaagtgtaaccgataataatgttattatatctagacaccagcgtctacatgacgagcttccgagttccaattggttcaagttttacataagtataaagtccgactattgttctatattatatatggttgttgatggatctgtgatgcatgcgatagctgataatagaactcacgcaattattagcaaaaatatattagacaatactacaattaacgatgagtgtagatgctgttattttgaaccacagattaggattcttgatagagatgagatgctcaatggatcatcgtgtgatatgaacagacattgtattatgatgaatttacctgatgtaggcgaatttggatctagtatgttggggaaatatgaacctgacatgattaagattgctctttcggtggctggtaatttaataagaaatcgagactacattcccgggagacgaggctatagctactacgtttacggtatagcctctagataatttttttaagcacgaaataaaaaacataattttaaaccaatctatttcatactattttgtgtgatcaccatggacataaagatagatattagtatttctggtgataaatttacggtgactactaggagggaaaatgaagaaagaaaaaaatatctacctctccaaaaagaaaaaactactgatgttatcaaacctgattatcttgagtacgatgacttgttagatagagatgagatgtttactattctagaggaatattttatgtacagaggtctattaggcctcagaataaaatatggacgactctttaacgaaattaaaaaattcgacaatgatgcggaagaacaattcggtactatagaagaactcaagcagaaacttagattaaattctgaagagggagcagataactttatagattatataaaggtacaaaaacaggatatcgtcaaacttactgtatacgattgcatatctatgataggattgtgtgcatgcgtggtagatgtttggagaaatgagaaactgttttctagatggaaatattgtttacgagcgattaaactgtttattaatgatcacatgcttgataagataaaatctatactgcagaatagactagtatatgtggaaatgtcatagaaagttaatgagagcaaaaatatataaggttgtattccatatttgttattttttctgtaatagttaaaaaaatacattcgatggtctatctatcagattattatgtgttataaggtactttttctcataataaactagagtatgagtaagatagtgtttttcaaaacatataaatctaaaattgatggatgagatatacagctattaatttcgaaaatatataaatctaaaattgatggataagatatacagctattaatttcgaaaatatattttaatctgataactttaaacatggatttttgatggtggtttaacgttttaaaaaaagattttgttattgtagtatatgataatattaaaagatggatataaagaatttgctgactgcatgtactattttttacattactacattggctacggcagatatacctactccgccaccaacgggtcatgtgacaagggagaatatcttgataagaggcataatcaatgttgtaatcggtgtccacctggagaatttgccaaggttagatgtaatggtaacgataacacaaaatgtgaacgctgcccacctcatacatataccacaatccccaattattctaatggatgtcatcaatgtagaaaatgcccaaccggatcatttgataaggtaaagtgtaccggaacacagaacagtaaatgttcgtgtcttcctggttggtattgcgctactgattcttcacagactgaagattgttgaaattgtgtaccaaaaaggagatgtccatgcggatactttggtggaatagatgaacaaggaaatcctatttgtaaatcgtgctgtattggtgaatattgcaactacctacgtaattatagacttgatccattttctccatgcaaactatctaaatgtaattaattatgattttgatgataatgttaccatacattatatcgctacttggttagtgtattattcagtatgaagacctattaataattacttatcttttgacgatcttgttataattataatataaaaacttatggcatagtaactcataattgctgacgcgataaattcgtaataatctgttttgttcaaatttttataaggaatctacaggcataaaaataaaaatataatttataatatactcttacagcgcgccatcatgaatagcagcagtaaattaattgctgttattaatggatttagaaatagtggacgattttgtgatattaatatagttattaatgatgaaaggataaacgctcacagactcatcctatctggagcctccgaatatttttccattctgttttccaataattttatcgattctaatgaatacgaagttaatctaagtcatttagattatcaaagtgttaacgatttgatcgattacatttatgggatacctttgagcctaactaacgataacgtgaaatatattctttcaaccgctgattttttacaaattggatctgccattactgagtgcgaaaaatacatacttaaaaatctttgttctagaaactgtatcgatttctacatatacgctgataaatataataacaagaaaatagaatcagcgtcgtttaacacaatattacgaaatattttgagactcatcaacgatgaaaactttaaatacttaacagaggaatcaatgataaaaattttaagcgatgatatgttaaatataaaaaatgaggattttgcaccactaattctcattaaatggttagagagtactcaacaatcatgcaccgtcgagttacttagatgcctcagaatatcattgctttccccacaagttataaaatcactttatagtcatcaactggttagttcaatctacgaatgtataacattcttaaacaatatagcattcttggatgaatcatttcctagataccatagcatcgagttgatatctatcggtataagtaattcgcatgataagatttccataaactgctacaatcataaaaaaaatacatgggaaatgatatcttcacgtagatataggtgtagtttcgcagtggccgtcctggataatattatctatatgatgggtggatatgatcagtccccgtatagaagttcaaaggttatagcgtacaatacatgtacaaattcttggatatatgatataccagagctaaaatatcctcgttctaattgtgggggactggctgatgacgaatacatttattgtataggcggcatacgcgatcaggattcatcgttgacatctagtattgatagatggaagccatcaaaaccatattggcagaagtatgctaaaatgcgcgaaccaaaatgtgatatgggggttgcgatgttaaacggattaatatatgtcatgggtggaatcgttaaaggtgacacgtgtaccgacgcactagagagtttatcagaagatggatggatgaagcatcaacgtcttccaataaaaatgtccaatatgtcgacgattgttcatgatggcaagatttatatatctggaggttacaacaatagtagtgtagttaatgtaatatcgaatctagtccttagctataatccgatatatgatgaatggaccaaattatcatcattaaacattcctagaattaatcccgctctatggtcagcgcataataaattatatgtaggaggaggaatatctgatgatgttcgaactaatacatctgaaacatacgataaagaaaaagattgttggacattggataatggtcacgtgttaccacgcaattatataatgtataaatgcgaaccgattaaacataaatatccattggaaaaaacacagtacacgaatgattttctaaagtatttggaaagttttataggtagttgatagaacaaaatacataattttgtaaaaataaatcactttttatactaatatgacacgattaccaatacttttgttactaatatcattagtatacgctacaccttttcctcagacatctaaaaaaataggtgatgatgcaactctatcatgtaatcgaaataatacaaatgactacgttgttatgagtgcttggtataaggagcccaattccattattcttttagctgctaaaagcgacgtcttgtattttgataattataccaaggataaaatatcttacgactctccatacgatgatctagttacaactatcacaattaaatcattgactgctagagatgccggtacttatgtatgtgcattctttatgacatcaactacaaatgacactgataaagtagattatgaagaatactccacagagttgattgtaaatacagatagtgaatcgactatagacataatactatctggatctacacattcaccagaaactagttctgagaaaccagaggatatagataattttaattgctcgtcggtattcgaaatcgcgactccggaaccaattactgataatgtagaagatcatacagacaccgtcacatacactagtgatagcattaatacagtaagtgcatcatctggagaatccacaacagacgagactccggaaccaattactgataaagaagaagatcatacagtcacagacactgtctcatacactacagtaagtacatcatctggaattgtcactactaaatcaaccaccgatgatgcggatctttatgatacgtacaatgataatgatacagtaccaccaactactgtaggcggtagtacaacctctattagcaattataaaaccaaggactttgtagaaatatttggtattaccgcattaattatattgtcggccgtggcaatattctgtattacatattatatatataataaacgttcacgtaaatacaaaacagagaacaaagtctagatttttgacttacataaatgtctgggatagtaaaatctatcatattgagcggaccatctggttcaggaaagacagccatagccaaaagactatgggaatatatttggatttgtggtgtcccataccactagatttcctcgtcctatggaacgagaaggtgtcgattaccattacgttaacagagaggccatctggaagggaatagccgccggaaactttctagaacatactgagtttttaggaaatatttacggaacttctaaaactgctgtgaatacagcggctattaataatcgtatttgtgtgatggatctaaacatcgatggcgttagaagtcttaaaaatacgtacctaatgccttactcggtgtatataagacctacctctcttaaaatggttgagaccaagcttcgttgtagaaacactgaagcggatgatgagattcatcgtcgtgtgatgttggcaaaaactgacatggatgaggcaggtgaagccggtctattcgacactattatcattgaagatgatgtgaatttagcatatagtaagttaattcagatactacaggaccgtattagaatgtattttaacactaattagagacttaagacttaaaacttgataattaataatataactcgtttttatatgtggctatttcaacgtctaatgtattagttaaatattaaaacttaccacgtaaaacttaaaatttaaaatgatatttcattgacagatagatcacacattatgaactttcaaggacttgtgttaactgacaattgcaaaaatcaatgggtcgttggaccattaataggaaaaggtggattcggtagtatttatactactaatgacaataattatgtagtaaaaatagagcccaaagctaacggatcattatttaccgaacaggcattttatactagagtacttaaaccatccgttatcgaagaatggaaaaaatctcacaatataaagcacgtaggtcttatcacgtgcaaggcatttggtctatacaaatccattaatgtggaatatcgattcttggtaattaatagattaggtgcagatctagatgcggtgatcagagccaataataatagattaccaaaaaggtcggtgatgttgatcggaatcgaaatcttaaataccatacaatttatgcacgagcaaggatattctcacggagatattaaagcgagtaatatagtcttggatcaaatagataagaataaattatatctagtggattacggattggtttctaaattcatgtctaatggcgaacatgttccatttataagaaatccaaataaaatggataacggtactctagaatttacacctatagattcgcataaaggatacgttgtatctagacgtggagatctagaaacacttggatattgtatgattagatggttgggaggtatcttgccatggactaagatatctgaaacaaagaattgtgcattagtaagtgccacaaaacagaaatatgttaacaatactgcgactttgttaatgaccagtttgcaatatgcacctagagaattgctgcaatatattaccatggtaaactctttgacatattttgaggaacccaattacgacgagtttcggcacatattaatgcagggtgtatattattaagtgtggtgtttggtcgatgtaaaatttttgtcgataaaaattaaaaaataacttaatttattattgatctcgtgtgtacaaccgaaatcatggcgatgttttacgcacacgctctcggtgggtacgacgagaatcttcatgcctttcctggaatatcatcgactgttgccaatgatgtcaggaaatattctgttgtgtcagtttataataacaagtatgacattgtaaaagacaaatatatgtggtgttacagtcaggtgaacaagagatatattggagcactgctgcctatgtttgagtgcaatgaatatctacaaattggagatccgatccatgatcaagaaggaaatcaaatctctatcatcacatatcgccacaaaaactactatgctctaagcggaatcgggtacgagagtctagacttgtgtttggaaggagtagggattcatcatcacgtacttgaaacaggaaacgctgtatatggaaaagttcaacatgattattctactatcaaagagaaggccaaagaaatgaatgcactcagttcaggacctatcatcgattaccacgtctggataggagattgtatctgtcaagttactgctgtggacgtacatggaaaggaaattatgagaatgagattcaaaaagggtgcggtgctacagatcccaaatctggtaaaagttaaacttggggagaatgatacagaaaatctttcttctactatatcggcggcaccatcgaggtaaccacctctcaagaagaccgcgtgaataatgtactcatgaaacgtttggaaactatacgccatatgtggtctgttgtatatgatcattttgatattgtgaatggtaaagaatgctgttatgtgcatacgcattcatctaatcaaaatcctataccgagtactgtaaaaacaaatttgtacatgaagactatgggatcatgcattcaaatggattccatggaagctctagagtatcttagcgaactgaaggaatcaggtggatggagtcccagaccagaaatgcaggaatttgaatatccagatggagtggaagacactgaatcaattgagagattggtagaggagttcttcaatagatcagaacttcaggctggtaaattagtcaaatttggtaattctattaattgttaaacatacatctgtttcagctaagcaactaagaacacgtatacggcagcagcttccttttatactctcatcttttaccaacacaaagggtggatatttgttcattggagttgataataatacacacaaagtatttggattcacggtgggttacgactacctcagactgatagagaatgatatagaaaagcatatcaaaagactttgtgttgtgcatttctgtgagaagaaagaggacatcaagtacacgtgtcgattcatcaaggtatataaacctggggatgaggctacctcgacatacgtgtgcgctatcaaagtggaaagatgctgttgtgctgtgtttgcagattggccagaatcatggtatatggatactaatggtatcaagaagtattctccagatgaatgggtgtcacatataaaattttaattaatgtaactatagagaacaaataataggttgtaatatcatatagacaataactaacaattaattagtaactgttatctcttttttaactaaccaactaactatatacctattaatacatcgtaattatagttcttaacatctattaatcattgattcgcttctttaattttttataaactaacattgttaattgaaaagggataacatgttacagaatataaattatatatggatttttttaaaaaggaaatacttgactggagtgtatatttatctcttcattatatagcacgcgtgtgttccaattcttccacatcccatataatacaggattataatctcgttcgaacatacgagaaagtggataaaacaatagttgattttttatctaggttgccaaatttattccatattttagaatatggggaaaatattctacatatttattctatggatgatgctaatacgaatattataattttttttctagatagagtattaaatattaataagaacgggtcatttatacacaatctcaggttatcatcatccattaatataaaagaatatgtatatcaattagttaataatgatcatccagataataggataagactaatgcttgaaaatggacgtagaacaagacattttttgtcctatatatcagatacagttaatatctatatatgtattttaataaatcatggattttatatagatgcagaagacagttacggttgtacattattacatagatgtatatatcactataagaaatcagaatcagaatcatacaatgaattaattaagatattgttaaataatggatccgatgtagataaaaaagatacgtacggaaacacaccttttatcctattatgtaaacacgatatcaacaacgtggaattgtttgagatatgtttagagaatgctaatatagactctgtagactttaatagatatacacctcttcattatgtctcatgtcgtaataaatatgattttgtaaagttattaatttctaaaggagcaaatgttaatgcgcgtaataaattcggaactactccattttattgtggaattatacacggtatctcgcttataaaactatatttggaatcagacacagagttagaaatagataatgaacatatagttcgtcatttaataatttttgatgctgttgaatctttagattatctattatccagaggagttattgatattaactatcgtactatatacaacgaaacatctatttacgacgctgtcagttataatgcgtataatacgttggtctatctattaaacagaaatggtgattttgagacgattactactagtggatgtacatgtatttcggaagcagtcgcaaacaacaacaaaataataatggaagtactattgtctaaacgaccatctttgaaaattatgatacagtctatgatagcaattactaaaaataaacaacataatgcagatttattgaaaatgtgtataaaatatactgcgtgtatgaccgattatgatactcttatagatgtacagtcgctacagcaatataaatggtatattttaaaatgtttcgatgaaatagatatcatgaagagatgttatataaaaaataaaactgtattccaattagttttttgtatcaaagacattaatactttaatgagatatggtaaacatccttctttcgtgaagtgcactagtctcgacgtatacggaagtcgtgtacgtaatatcatagcatctattagatatcgtcagagattaattagtctattatccaagaagctggatgcgggagataaatggtcgtgttttcctaacgaaataaaatataaaatattggaaaactttaacgataacgaactatccacatatctaaaaatcttataaacactattaaaatataaaatctaagtaggataaaatcacactacatcattgtttccttttagtgctcgacagtgtatactatttttaacactcataaataaaaatgaaaacgatttccgttgttacgttgttatgcgtactacctgctgttgtttattcaacatgtactgtacccactatgaataacgctaaattaacgtctaccgaaacatcgtttaatgataaacagaaagttacatttacatgtgatcagggatatcattctttggatccaaatgctgtctgcgaaacagataaatggaaatacgaaaatccatgcaagaaaatgtgcacagtttctgattatgtctctgaattatatgataagccattatacgaagtgaattccaccatgacactaagttgcaacggcgaaacaaaatattttcgttgcgaagaaaaaaatggaaatacttcttggaatgatactgttacgtgtcctaatgcggaatgtcaacctcttcaattagaacacggatcgtgtcaaccagttaaagaaaaatactcatttggggaatatatgactatcaactgtgatgttggatatgaggttattggtgcttcgtacataagttgtacagctaattcttggaatgttattccatcatgtcaacaaaaatgtgatataccgtctctatctaatggattaatttccggatctacattttctatcggtggcgttatacatcttagttgtaaaagtggttttatactaacgggatctccatcatccacatgtatcgacggtaaatggaatcccatactcccaacatgtgtacgatctaacgaaaaatttgatccagtggatgatggtcccgacgatgagacagatttgagcaaactctcgaaagacgttgtacaatatgaacaagaaatagaatcgttagaagcaacttatcatataatcatagtggcgttaacaattatgggcgtcatatttttaatctccgttatagtattagtttgttcctgtgacaaaaataatgaccaatataagttccataaattgctaccgtaaatataaatccgttaaaataattaataatttaataacaaacaagtatcaaaagattaaagacttatagctagaatcaattgagatgtcttcttcagtggatgttgatatctacgatgccgttagagcatttttactcaggcactattataacaagagatttattgtgtatggaagaagtaacgccatattacataatatatacaggctatttacaagatgcgccgttataccgttcgatgatatagtacgtactatgccaaatgaatcacgtgttaaacaatgggtgatggatacacttaatggtataatgatgaatgaacgcgatgtttctgtaagcgttggcaccggaatactattcatggaaatgtttttcgattacaataaaaatagtatcaacaatcaactaatgtatgatataattaatagcgtatctataattctagctaatgagagatatagaagcgcttttaacgacgatggtatatacatccgtagaaatatgattaacaagttgtacggatacgcatctctaactactattggcacgatcgctggaggtgtttgttattatctgttgatgcatctagttagtttgtataaataattatttcaatatactagttaaaattttaagattttaaatgtataaaaaactaataacgtttttatttgtaataggtgcattagcatcctattcgaataatgagtacactccgtttaataaactgagtgtaaaactctatatagatggagtagataatatagaaaattcatatactgatgataataatgaattggtgttaaattttaaagagtacacaatttctattattacagagtcatgcgacgtcggatttgattccatagatatagatgttataaacgactataaaattattgatatgtataccattgactcgtctactattcaacgcagaggtcacacgtgtagaatatctaccaaattatcatgccattatgataagtacccttatattcacaaatatgatggtgatgagcaacaatattctattactgcagagggaaaatgctataaaggaataaaatatgaaataagtatgatcaacgatgatactctattgagaaaacatactcttaaaattggatctacttatatatttgatcgtcatggacatagtaatacatattattcaaaatatgatttttaaaaatttaaaatatattatcacttcagtgacagtagtcaaataacaaacaacaccatgagatatattataattctcgcagttttgttcattaatagtatacacgctaaaataactagttataagtttgaatccgtcaattttgattccaaaattgaatggactggggatggtctatacaatatatcccttaaaaattatggcatcaagacgtggcaaacaatgtatacaaatgtaccagaaggaacatacgacatatccgcatttccaaagaatgatttcgtatctttctgggttaaatttgaacaaggcgattataaagtggaagagtattgtacgggactatgcgtcgaagtaaaaattggaccaccgactgtaacattgactgaatacgacgaccatatcaatttgtacatcgagcatccgtatgctactagaggtagcaaaaagattcctatttacaaacgcggtgacatgtgtgatatctacttgttgtatacggctaacttcacattcggagattctaaagaaccagtaccatatgatatcgatgactacgattgcacgtctacaggttgcagcatagactttgtcacaacagaaaaagtgtgcgtgacagcacagggagccacagaagggtttctcgaaaaaattactccatggagttcgaaagtatgtctgacacctaaaaagagtgtatatacatgcgcaattagatccaaagaagatgttcccaatttcaaggacaaaatggccagagttatcaagagaaaatttaataaacagtctcaatcttatttaactaaatttctcggtagcacatcaaatgatgttaccacttttcttagcatgcttaacttgactaaatattcataactaatttttattaatgatacaaaaacgaaataaaactgcatattatacactggttaacgcccttataggctctaaccattttcaagatgaggtccctgattatagtccttctgttcccctctatcatctactccatgtctattagacgatgtgagaagactgaagaggaaacatggggattgaaaatagggttgtgtataattgccaaagatttctatcccgaaagaactgattgcagtgttcatctcccaactgcaagtgaaggattgataactgaaggcaatggattcagggatatacgaaacaccgataaattataaaaaaagcaatgtgtccgctgtttccgttaataatactattttcgtaactggcggattattcataaataactctaatagcacgatcgtggttaacaatatggaaaaacttgacatttataaagacaaacaatggtcgattatagaaatgcctatggctagggtatatcacggcatcgactcgacatttggaatgttatattttgccggaggtctatccgttaccgaacaatatggtaatttagagaaaaacaacgagatatcttgttacaatcctagaacgaataagtggtttgatatttcatatactatttataagatatccatatcatcattgtgtaaactaaataacgtcttctatgtatttagtaaggacattggatatgtggaaaagtatgatggtgcatggaagttagtacatgatcgtctccccgctataaaggcattatcaacttctccttattgattgaaaatgaaaatataaatagtttttatgtatagcagtattaccctatagttttattgcttactactaacatggatacagatgttacaaatgtagaagatatcataaatgaaatagatagagagaaagaagaaatactaaaaaatgtagaaattgaaaataataaaaacattaacaagaatcatccaagtggatatattagagaagcactcgttattaatacaagtagtaatagtgattccattgataaagaagttatagaatgtatcagtcacgatgtaggaatatagatcatatctactaatttttataatcgatacaaaacataaaaaacaactcgttattacatagcaggcatggaatccttcaagtattgttttgataacgatggcaagaaatggattatcggaaatactttatattctggtaattcaatactatataaggtcagaaaaaatttcactagttcgttctacaattacgtaatgaaaatagatcacaaatcacacaagccattgttgtctgaaatacgattctatatatctgtattggatcctttgactatcgacaactggacacgggaacgtggtataaagtatttggctattccagatctgtatggaattggagaaaccgatgattatatgttcttcgttataaagaattcgggaagagtattcgccccaaaggatactgaatcagtcttcgaagcatgcgtcactatgataaacacgttagagtttatacactctcgaggatttacccatggaaaaatagaaccgaggaatatactgattagaaataaacgtctttcactaattgactattctagaactaacaaactatacaagagtggaaactcacatatagattacaacgaggacatgataacttcaggaaatatcaattatatgtgtgtagacaatcatcttggagcaacagtttcaaaacgaggagatttagaaatgttgggatattgcatgatagaatggttcggtggcaaacttccatggaaaaacgaaagtagtataaaagtaataaaacaaaaaaaagaatataaaaaatttatagctactttctttgaggactgttttcctgaaggaaatgaacctctggaattagttagatatatagaattagtatacacgttagattattctcaaactcctaattatgacagactacgtaaactgtttatacaagattgaaattatattctttttttatagagtgtggtagtgttacggatatctaatattaatattagactatctctatcgcgctacacgaccaatatcgattactatggatatcttcagggaaatcgcatcttctatgaaaggagagaatgtattcatttctccagcgtcaatctcgtcagtattgacaatactgtattatggagctaatggatccactgctgaacagctatcaaaatatgtagaaacggaggagaacacggataaggttagcgctcagaatatctcattcaaatccatgaataaagtatatgggcgatattctgccgtgtttaaagattcctttttgagaaaaattggcgataagtttcaaactgttgacttcactgattgtcgcactatagatgcaatcaacaagtgtgtagatatctttactgaggggaaaatcaatccactattggatgaaccattgtctcctgatacctgtctcctagcaattagtgccgtatactttaaagcaaaatggttgatgccattcgaaaaggaatttaccagtgattatcccttttacgtatctccgacggaaatggtagatgtaagtatgatgtctatgtacggcaaggcatttaatcacgcatctgtaaaggaatcattcggcaacttttcaatcatagaactgccatatgttggagatactagtatgatggtcattcttccagacaagattgatggattagaatccatagaacaaaatctaacagatacaaattttaagaaatggtgtaactctctggaagctacgtttatcgatgttcacattcccaagtttaaggtaacaggttcgtataatcttgtggatactctagtaaagtcaggactgacagaggtgttcggttcaactggagattatagcaatatgtgtaattcagatgtgagtgtcgacgctatgattcacaaaacgtatatagatgtcaatgaagagtatacagaagcagctgcagcaacttgtgcactggtgtcagactgtgcatcaacaattacaaatgagttctgtgtagatcatccgttcatctatgtgattaggcatgttgatggaaaaattcttttcgttggtagatattgctctccgacaactaattgttaaccattttttttaaaaaaatagaaaaaacatgtggtattagtgcaggtcgttgttcttccaattgcaattggtaagatgacggccaactttagtacccacgtcttttcaccacagcactgtggatgtgacagactgaccagtattgatgacgtcagacaatgtttgactgaatatatttattggtcgtcctatgcataccgcaacaggcaatgcgctggacagttgtattccacactcctctcttttagagatgatgcggaatcagtgttcatcgacattcgcgagctggtaaaaaatatgccgtgggatgatgtcaaagattgtacagaaatcatccgttgttatataccggatgagcaaaaaaccatcagagagatttcggccatcatcggactttgtgcatatgctgctacttactggggaggtgaagaccatcccactagtaacagtctgaacgcattgtttgtgatgcttgagatgctcaattacgtggattataacatcatattccggcgtatgaattgatgagttgtacatcttgacattttctttcttctcttctccctttcttctcttctcccttcctccctcttctccctttcccagaaacaaacttttttacccactataaaataaaatgagtatactacctattatatttcttcctatatttttttattcttcattcgttcagacttttaacgcgcctgaatgtatcgacaaagggcaatattttgcatcattcatggagttagaaaacgagccagtaatcttaccatgtcctcaaataaatacgctatcatccggatataatatattagatattttatgggaaaaacgaggagcggataatgatagaattataccgatagataatggtagcaatatgctaattctgaacccgacacaatcagactctggtatttatatatgcattaccacgaacgaaacctactgtgacatgatgtcgttaaatttgacaatcgtgtctgtctcagaatcaaatatagatcttatctcgtatccacaaatagtaaatgagagatctactggcgaaatggtatgtcccaatattaatgcatttattgctagtaacgtaaacgcagatattatatggagcggacatcgacgccttagaaataagagacttaaacaacggacacctggaattattaccatagaagatgttagaaaaaatgatgctggttattatacatgtgttttagaatatatatacagaggtaaaacatataacgtaaccagaattgtaaaattagaggtacgggataaaataataccttctactatgcaattaccagatggcattgtaacttcaataggtagtaatttgactattgcgtgtagagtatcgttgagacctcccacaacggatgcagacgtcttttggataagtaatggtatgtattacgaagaagatgatggggacggagacggtagaataagtgtagcaaataaaatctatatgaccgataagagacgtgttattacatcccggttaaacattaatcctgtcaaggaagaagatgctacaacgtttacgtgtatggcgtttactattcctagcatcagcaaaacagttactgttagtataacgtgaatgtatgttgttacatttccatgtcaattgagtttataagaatttttatacattatcttccaacaaacaattgacgaacgtattgctatgattaactcccacgatactatgcatattattaatcattaacttgcagactatacctagtgctattttgacatactcatgttcttgtgtaattgcggtatctatattattaaagtacgtaaatctagctatagttttattatttaattttagataatataccgtctccttatttttaaaaattgccacatcctttattaaatcatgaatgggaatttctatgtcatcgttagtatattgtgaacaacaagagcagatatctataggaaagggtggaatgcgatacattgatctatgtagttttaaaacacacgcgaactttgaagaatttatataaatcattccatcgatacatccttctatgttgacatgtatatatccaggaattcttttattaatgtcaggaaatgtataaactaaaacattgcccgaaagcggtgcctctatctgcgttatatccgttcttaacttacaaaatgtaaccaatacctttgcatgacttgttttgttcggcaacgttagtttaaacttgacgaatggattaattacaatagcatgatccgcgcatctattaagtttttttactttaacgcccttgtatgtttttacagagactttatctaaatttctagtacttgtatgtgttataaatataacgggatatagaactgaatcacctaccttagatacccaattacattttatcagatccagataataaacaaattttgtcgccctaactaattctatattgttatatattttacaattggttatgatatcatgtaataacttggagtctaacgcgcatcgtcgtacgtttatacaattgtgatttagtgtagtatatctacacatgtatttttccgcactatagtattctggactagtgataaaactatcgttatatctgtcttcaatgaactcatcgagatattgctctctgtcatattcatacacctgcataaactttctagacatcttacaatccgtgttattttaggatcatatttacatatttacgggtatatcaaagatgttagattagttaatgggaatcgtctataataatgaatattaaacaattatatgaggacttttaccacaaagcatcataaaaatgagtcgtcgtctgatttatgttttaaatatcaaccgcaaatcaactcataaaatacaagagaatgaaatatatacatattttagtcattgcaatatagaccatacttctacagaacttgattttgtagttaaaaactatgatctaaacagacgacaacatgtaactgggtatactgcactacactgctatttgtataataattactttacaaacgatgtactgaagatattattaaatcatgacgtaaatgtaacgatgaaaaccagtagcggacgtatgcctgtttatatattgcttactagatgttgcaatatttcacatgatgtagtgatagatatgatagacaaagataaaaaccacttattacatagagactattccaacctattactagagtatataaaatctcgttacatgttattaaaggaagaggatatcgatgagaacatagtatccactttattagataagggaatcgatcctaactttaaacaagacggatatacagcgttacattattattatttgtgtctcgcacacgtttataaaccaggtgagtgtagaaaaccgataacgataaaaaaggccaagcgaattatttctttgtttatacaacatggagctaatctaaacgcgttagataattgtggtaatacaccattccatttgtatcttagtattgaaatgtgtaataatattcatatgactaaaatgctgttgacttttaatccgaatttcaaaatatgtaataatcatggattaacgcctatactatgttatataacttccgactacatacaacacgatattcttgttatgttaatacatcactatgaaacaaatgttggagaaatgccgatagatgagcgtcgtatgatcgtattcgagtttatcaaaacatattctacacgtccggcagattcgataacttatttgatgaataggtttaaaaatataaatatttatacccgctatgaaggaaagacattattacacgtagcatgtgaatataataatacacacgtaatagattatcttatacgtatcaacggagatataaatgcgttaaccgacaataacaaacacgctacacaactcattatagataacaaagaaaattccccgtataccatcgattgtttactgtatatacttagatatattgtagataagaatgtgataagatcgttggtggatcaacttccatctctacctatcttcgatataaaatcatttgagaaattcatatcctactgtatacttttagatgacacattttacgataggcacgttaagaatcgcgattctaaaacgtatcgatacgcattttcaaaatacatgtcgtttgataaatacgatggtataataactaaatgtcacgacgaaacaatgttactcaaactgtccactgttctagacactacactatatgcagttttaagatgccataattcgaaaaagttaagaagatacctcaacgagttaaaaaaatataataacgataagtcctttaaaatatattctaatattatgaatgagagataccttaatgtatattataaagatatgtacgtgtcaaaggtatatgataaactatttcctgttttcacagataaaaattgtctactaacattactaccttcagaaattatatacgaaatattatacatgctgacaattaacgatctttataatatatcgtatccacctaccaaagtatagttgtatttttctcatgcgatgtgtgtaaaaaaactgatattatataaatattttagtgccgtataataaagatgacgatgaaaatgatggtacatatatatttcgtatcattattgttattgctattccacagttacgccatagacatcgaaaatgaaatcacagaattcttcaataaaatgagagatactctaccagctaaagactctaaatggttgaatccagcatgtatgttcggaggcacaatgaatgatatagccgctctaggagagccattcagcgcaaagtgtcctcctattgaagacagtcttttatcgcacagatataaagactatgtggttaaatgggagaggctagaaaagaatagacggcgacaggtttctaataaacgtgttaaacatggtgatttatggatagccaactatacatctaaattcagtaaccgtaggtatttgtgtaccgtaactacaaagaatggtgactgtgttcagggtatagttagatctcatattaaaaaacctccttcatgcattccaaaaacatatgaactaggtactcatgataagtatggcatagacttatactgtggaattctttacgcaaaacattataataatataacttggtataaagataataaggaaattaatatcgacgacattaagtattcacaaacgggaaagaaattaattattcataatccagagttagaagatagtggaagatacaactgttacgttcattacgacgacgttagaatcaagaatgatatcgtagtatcaagatgtaaaatacttacggttataccgtcgcaagaccacaggtttaaactaatactagatccaaaaatcaacgtaacgataggagaacctgccaatataacatgcactgctgtgtcaacgtcattattgattgacgatgtactgattgaatgggaaaatccatccggatggcttataggattcgattttgatgtatactctgttttaactagtagaggcggtattaccgaggcgaccttgtactttgaaaatgttactgaagaatatataggtaatacatataaatgtcgtggacacaactattattttgaaaaaacccttacaactacagtagtattggagtaaatacacaatgcatttttatatacattactgaataattattattattatttatatcgtatttgtgctataacgcgactatctaggtatttgtatctcactgatagagaacatataaatatagactctattaaacagttgtgtaaaatatcaaatcctaatagatgtggatgtacggctttacatgagtacttttataattatagatcagtcaacggaaaatacaagtatagatacaacggttactatcaatattatttatctagcgattatgaaaattataatgaatattattatgatgattatgatagaactggtatgaacagtgagagtgataatatatcaatcaaaacagaatatgaattctatgatgaaacacaagatcaaagtacacaactagtaggttacgacattaaactcaaaaccaatgaggatgattttatggctatgatagatcagtgggtgtccatgattatatagatgaatcaattaataaagtagtatatggaagagagtctcacgtaagatggcgggatatatggcaagaacataatgatggcgtatacagtataggaaaggagtgcatagataatatatacgaagacaaccataccgtagacgaattctacaagatagacagcgtatcagatgtagatgacgcggaacacatatctccgataactaatgatgtatctacacaaacatgggaaaagaaatcagagttagatagatacatggaaatgtatcctcgtcatagatatagtaagcattctgtctttaagggattttctgacaaagttagaaaaaatgatttagacatgaatgtggtaaaagaattactttctaacggtgcatctctaacaattaaggatagcagtaataaggatccaataaccgtttattttcgaagaacgataatgaatttagaaatgattgatattattaacaaacatacaactattgatgaacgaaagtatatagtacactcctatctaaaaaattataaaaatttcgattatccatttttcaggaagttagttttgactaataaacattgtctcaacaattattataatataagcgacagcaaatatggaacaccgctacatatattggcgtctaataaaaaattaataactcctaattacatgaagttattagtgtataacggaaatgatataaacgcacgaggtgaagatacacaaatgcgaactccattacacaaatatttgtgtaaatttgtatatcataatattgaatatggtatccgatactataatgaaaagattatagacgcatttatagagttaggagccgatctaactattccaaataacgatggaatgataccagtagtttactgtatacactcaaatgcagaatatggttataacaatattactaacataaagataatacgtaaactacttaatcttagtagacgtgcgtcacataatctatttagagatcgagtcatgcacgattatataagtaatacatatattgatcttgagtgtttagatattattagatcgttggatggattcgatatcaatggttactttgaaggacgtacaccacttcattgcgctatacaacataacttcactcagattgctaagtacttattagatcgaggagctgatatagtcgtacccaacacattgattatacatcagtacatacagtaaatagcatagatatggaggaggatacaaatatttcaaataaagttataaggtacaacactgtcaataatatatggaagacattacctaacttctggactggaactataaatccaggcgtggtctcgcataaagatgatatatatgttgtatgcgacatcaaagatgaaaaaaatgttaagacttgtatatttagatataacacgaatacgtataacggatgggaattggttacgacgacagaaagcagattatcagctctgcatactattcttcatgacaataccataatgatgttacattgttatgaatcgtatatgttacaagatacatttaatgtgtacactcgcgaatggaatcatatgtgtcatcaacattcgaatagttatatcatgtacaatatactacccatctactaaatataatagaataaaataaatgagtatgatcattttagataacgattgattttatcattaccgcttcattcttatattctttgcttacggaacctatatttagaaacatctactaacgattttttatgcttgcattattaatggtatgtaatatgattgattgtgtacgcaataccaatttgttaagtatgaatacggggtacaaacataaactgaaatttaacattatttatttatgatatatatcgttatcgttattgtttggtctataccatggatatctttaaagaactaatcttaaaacaccctgatgaaaatgttttgatttctccagtttctattttatctactttatctattctaaatcatggagcagctggttctacagctgaacaactatcaaaatatatagagaatatgaatgagaatacacccgatgataagaaggatgacaataatgacatggacgtagatattccgtattgtgcgacactagctaccgcaaataaaatatacggtagcgatagtatcgagttccacgcctccttcctacaaaaaataaaagacgattttcaaactgtaaactttaataatgctaaccaaacaaaggaactaatcaacgaatgggttaagacgatgacaaatggtaaaattaattccttattgactagtccgctatccattaatactcgtatgacagttgttagcgccgtccattttaaagcaatgtggaaatatccattttctaaacatcttacatatacagacaagttttatatttctaagaatatagttaccagtgttgatatgatggtgggtaccgagaataacttgcaatatgtacatattaatgaattattcggaggattctctattatcgatattccatacgagggaaactctagtatggtaattatactaccggacgacatagaaggtatatataacatagaaaaaaatataacagatgaaaaatttaaaaaatggtgtggtatgttatctactaaaagtatagacttgtatatgccaaagtttaaagtggaaatgacagaaccgtataatctggtaccgattttagaaaatttaggacttactaatatattcggatattatgcagattttagcaagatgtgtaatgaaactatcactgtagaaaaatttctacatacgacgtttatagatgttaatgaggagtatacagaagcatcggccgttacaggagtatttatgactaacttttcgatggtatatcgtacgaaggtctacataaaccatccattcatgtacatgattaaagacaacacaggacgtatactttttatagggaaatactgctatccgcaataaatataaacaaatagacttttatcacgtttatctatgtctaaatattacaaatagtaatagtataaactaaagctgataatacttaaaaaaataataatatcatttacaattaatagtataaactaaaaattaaacaaatcgttattataagtaatatcaaaatgatgatatacggattaatagcgtgtcttatattcgtgacttcatccatcgctagtccactttatattcccgttattccacccattacggaagataaatcgttcaatagtgtagaggtattagtttccttgtttagagatgaccaaaaagactatacggtaacttctcagttcaataactacactatcgataccaaagactggactatcggcgtactatccacacctgatggtttggatataccattgactaatataacttattggtcacggtttactataggtcgtgcattgttcaaatcagagtctgaggatattttccaaaagaaaatgagtattctaggtgtttctatagaatgtaagaagtcgtcgacattacttacttttttgaccgtgcgtaaaatgactcgagtatttaataaatttccagatatggcttattatcgaggagactgtttaaaagccgtttatgtaacaatgacttataaaaatactaaaactggagagactgattacacgtacctctctaatggggggttgcctgcatactatcgtaatggggtcgatggttgattattgattagtatattccttattcacacaaaaagaacatttttataaacatgaaaccactgtctaaatgtaattatgatcttgatttatagatgaagatcagcctttagaggattttaaccagtatgtttaatatgaaaaaaataaacataacatattttgagattaagcgctattgtgcttaattattttgctctataaactgaatatatagccacaattattgacgggcttgtttatgaccggcaatcatgaatttacagaaattatctctggctatatatcttactgcgacatgttcgtggtgttatgaaacatgcataagaaaaactgcgttgtatcatgacattcaattggagcatgtagaagacaataaagatagtgtagcgtcgctaccgtacaagtagtcaatcaaagagaacgtagtagattgttggctacatttaattggacagatatagctgagggtgttagaaatgagttcattaaaatatgtgatatcaacggaacatatttatataattatactattgctgttagtataattattgattccacggaagaactaccaacagttactccaattacaacaacatatgaaccttctacatataattatactatcgatgatagcactgttattactactgaagaactacaagtgactcctcatatggatctccatcgatgatacatgtattaaaatactttccgaataagtcttttaaatattgtattaattatgaaaaactatgctatgcgagtatgatgcaaagatgtttaatgatacgatactagattttatctctagcgagagatgtcgttagaatcatttatcataactacgtttaataataattcatcaacgaatatcgataacatgtgtcatttatacgttaaagtctgtccgtcttctctattgtttagactgtttgtagaatgctgtgatataaacaaactagtagaaggtacgactccgttacactgttatctaatgaatgaaggatttgaatcatctgttttaaaaaacctattaaaggagtatgtcatgaatacgtttaatgttcatgacatccattacacaaatatttaactcatgatgaagttgagaatgatatgctttctgatagtatagatagctttagctaatataaaaatatattaatccactatatattctagacttgatttaaaaccgataaactactactacgtactgtataagttgttaaaaaaaggagcagaccctaattatgtagatgatagaggtaatacttttcttcattacttctgcatctatatgtccacttatgagaaaacgtcatttaataagatgcatcgtgaaaagaaatttattaaagagttggtaaaatatgaaaccgaaagtaaataatataggaaatacacctctacataactacgtatctcaatatgatatcactctcattcctcatccacaacccattaaaaaaatggaaattaaagccctctattagcataaacggctacaggtctacctttacaatggcctctccttgtgcccagttcagaccctgtcattgccacgctactaaggactccctgaataccgtggccgacgtcagacattgtctgactgaatacatcctgtgggtttctcatagatggacccatagagaaagcgcagggtctctctacaggcttctcatctctttcagaactgatgcaacggagctctttggtggtgagttgaaggattcacttccgtgggacaatatcgacaattgcgtggagatcattaaatgtttcatcagaaatgactccatgaaaaccgccgaagaacttcgtgcaatcattggactttgtactcaatcagctatcgtctctggaagagtcttcaacgataagtatatcgacatactacttatgctgcgaaagattctgaacgagaacgactatctcaccctcttggatcatatccgcactgctaaatactaaatctccttcatgctctctcactacactttttatcatcttatgaggaatgattgccttcatcatttttcgtgaaataggaataattagcaccagaatagctatggattgcacatgtattctatgtcgtctactggatgaagatgtgacgtacaaaaaaataaaactagaaattgaaacgtgtcacaacttatcaaaacatatagatagacgaggaaacaatgcgctacattgttacgtcttcaataaatgcgatacagacattaagattgttcgactgttactctctcgcggagtcgagagactttgtagaaacaacgaaggattaactccgctaggagcatacagtaagcatagatacgtaaaatctcaaattgtgcatctactgatatccagctattcgaattcctctaacgaactcaagtcgaatataaatgatttcgatctgtattcgtatatgtcttcggataatatcgacttacgtctgctaaaatacctaattgtggataaacggatacgtccgtccaagaatacgaattatgcaatcaatggtctcggattggtggatatatacgtaacgacgcctaatccgagaccagaagtattgctatggcttcttaaatcagaatgttacagcaccggttacgtatttcgtacctgtatgtacgacagtgatatgtgtaagaactctcttcattactatatatcgtctcatagagaatctcaatctctatccaaggatgtaattaaatgtttgatcaataacaatgtttccatccatggcagagacgaaggaggatctttacccatccaatactactggtcttgctcaaccatagatatagagattgttaaattattaataaaggatgtggacacgtgtagagtatacgacgtcagccctatattagaggcggattatctaaacaagcgatttagagtaaccccatataatgtagacatggaaatcgttaatcttcttattgagagacgtcatactcttgtcgacgtaatgcgtagtattacttcttacgattccagagactataaccactacatcatcgataacattctaaagagatttagacaacaggatgaatccatcgtacaagccatgttgataaactacttacattacggcgatatggtcgttcgatgcatgttagataacggacaacaactatcctctgcacgactactttgttaataataatctcgtcgatgtaaacgtcgtaaggtttatcgtggaaaataatggacacatggctgtaaatcacgtatcgaacaatggccgtctatgtatgtacggtctgatattatcgagatttaataattgcgggtatcactgttatgaaaccatactaatagatgtatttgatatactaagcaagtacatggataatatagatatgatcgataatgagaataaaactctactatattacgcggtcgatgtcaataatatacaatttgcaaagcggttattggaatatggagcgagtgttacaacatcacgctcgataatcaatacggccatccagaaaagtagttacagaagagaaaacaaaacgaggatagttgatttattacttagctaccatcccactctagagactatgattgacgcatttaatagagatatacgctatctatatcctgaaccattattcgcctgtatcagatacgccttaatcctagatgatgattttccttctaaagtaagtatgatatctccggtcgtcataaggaactaaagcgctatagagtagacattaatagaatgaagaatgcctacatatcaggcgtctccatgtttgatatattatttaaacgaagcaaacgccacagattgagatacgcaaagaatccgacatcaaatggtacaaaaaagaactaacgtccatcattacagaaactgtaaagaacaatgagaggatcgactccatagtggacaacattaatacagacgataacttgatttcgaaattacccatggagatactttattactccattaaataatttatcatggagcgataatgtcctgtttcatttgtttccatgacatattacaaaatcgattccgtccaagatgataaaaacatttaccggcatcataaacacggagtttattttatatgtctcgcataaacattactaaaaaaatatattgttcggttttctttcacatctttaattatgaaaaagtaaatcattatgagatggacgagattgtacgcatcgttcgcgacagtatgtggtacatacctaacgtatttatggacgacggtaagaatgaaggtcacgtttctgtcaacaatgtttgtcatatgtattttacgttctttgatgtggatacatcgtctcatctgtttaagctagttattaaacactgcgatctgaataaacgaggtaactctccattacattgctatacgatgaatacacgatttaatccatctgtattaaagatattgttacaccacggcatgcgtaactttgatagcaaggatgaaaaaggacatattcctctacaccactatctgattcattcactatcaatcgataacaagatctttgatatactaacggacaccattgatgactttagtaaatcatccgatctattgctgtgttatcttagatataaattcaatgggagcttaaactattacgttctgtacaaaggatccgaccctaattgcgtcgacgaggatggactcacttctcttcattactactgtaaacacatatccacgttctacaaaagcaattattacaagttaagtcacactaagatgcgagccgagaagcgattcatctacgcgataatagattatggagcaaacattaacgcggttacacacttaccttcaacagtataccaaacatagtcctcgtgtggtgtatgctcttttatctcgaggagccgatacgaggatacgtaataatcttgattgtacacccatcatggaacgattgtgcaacaggtcatattctcataatgttactcaattggcacgaacaaaaggaagaaggacaacatctactttatctattcataaaacataatcaaggatacactctcaatatactacggtatctactagataggttcgacattcagaaagacgaatactataataccgcctttcaaaattgtaacaacaatgttgcctcatacatcggatacgacatcaaccttccgactaaagacggtattcgacttggtgtttgaaaacagaaacatcatatacaaggcggatgttgtgaatgacatcatccaccacagactgaaagtatctctacctatgattaaatcgttgttctacaagatgtcagaattctctccctacgacgattactacgtaaaaaagatactagcctactgcctattaagggacgagtcattcgcggaactacatagtaaattctgtttaaacgaggactataaaagtgtatttatgaaaaatatatcattcgataagatagattccatcatcgtgacataagtcgccttaaagagattcgaatctccgacaccgacctgtatacggtatcacagctatcttaaagccatacattcggacagacacatttcatttcccatgtacgacgatctcatagaacagtgccatctatcgatggagcataaaagtaaactcgtcgacaaagcactcaataaattagagtctaccatcggtcaatctagactatcgtatttgcctccggaaattatgcgcaatatcatctaaacagtatgttgtacggaaagaaccattacaaatattatccatgatagaaagaaaatatctatatgattggagaagtaggaaacaggaacaagacgacgattactacattattaaatcatgaagtccgtattatactcgtatatattgtttctctcatgtataataataaacggaagagatatagcaccgcatgcaccatccgatggaaagtgtaaagacaacgaatacaaacgccataatttgtgtccgggaacatacgcttccagattatgcgatagcaagactaacacacgatgtacaccctgtggttcgggtaccttcacatctcgcaataatcatttacccgcttgtctaagttgtaacggaagacgcgatcgtgtaacacgactcacaatagaatctgtgaatgctctcccggatattattgtcttctcaaaggatcatccggatgcaaggcatgtgtttcccaaacaaaatgtggaataggatacggagtatccggagacgtcatctgttctccgtgtggtctcggaacatattctcacaccgtctcttccgcagataaatgcgaacccgtacccagtaatacctttaactatatcgatgtggaaattaatctgtatcccgtcaacgacacgtcgtgtactcggacgaccactaccggtctcagtgaatccatctcaacgtcggaactaactattactatgaatcataaagactgtaatcccgtatttcgtgaggaatacttctctgtccttaataaggtagcaacttcaggtttctttacaggagaaaggtgtgcactctgaatttcgagattaaatgcaataacaaagattcttcctccaaacagttaacgaaagcaaagaatgatgacggtatcatgccgcattcggagacagtaactctagtgggcgactgtatatctagcgtcgacatctatatactatatagtaataccaatactcaagactacgaaactgatacaatctcttatcatgtgggtaatgttctcgatgtcgatagccatatgcccggtagttgcgatatacataaactgatcactaattccaaacccacccgctttttatagtaagtttttcacccataaataataaatacaataattaatttctcgtaaaagtagaaaatatattctaatttattgcatggtaaggaagtagaatcataaagaacagtactcaatcaatagcaattatgaaacaatatatcgtcctggcatgcatgtgcctgccagtcttcagcaatcatcctcatcctcatcctcgtgtacggaagaagaaaacaaacatcatatgggaatcgatgttattatcaaagtcacaaagcaagaccaaacaccgaccaatgataagatttgccaatccgtaacggaaattacagagtccgagtcagatccaaatcccgaggtggaatcagaagatgattccacatcagtcgaggatgtagatcctcctaccacttattactccatcatcggtggaggtctgagaatgaactttggattcaccaaatgtcctcagattaaatccatctcagaatccgctgatggaaacacagtgaatgctagattgtccagcgtgtccccaggacaaggtaaggactctcccgcgatcactcatgaagaagctcttgctatgatcaaagactgtgaggtgtctatcgacatcagatgtagcgaagaagagaaagacagcgacatcaagacccatccagtactcgggtctaacatctctcataagaaagtgagttacgaagatatcatcggttcaacgatcgtcgatacaaaatgtgtcaagaatctagagtttagcgttcgtatcggagacatgtgcaaggaatcatctgaacttgaggtcaaggatggattcaagtatgtcgacggatcggcatctgaaggtgcaaccgatgatacttcactcatcgattcaacaaaactcaaagcgtgtgtctgaatcgataactctattcatctgaaattggatgagtagggttaatcgaacgattcaggcacaccacgaattaaaaaagtgtaccggacactatattccggtttgcaaaacaaaaatgttcttaactacattcacaaaaagttacctctcgcgacttcttctttttctgtctcaatagtgtgatacgattatgacactattcctattcctattcctatttcctttcagggtatcacaaaaatattaaacctctttctgatggtctcataaaaaaagttttacaaaaatatttttattctctttctctctttgatggtctcataaaaaaagttttacaaaaatatttttattctctttctctctttgat

SEQ ID NO: 50 - DNA, 196535 bp, Vaccinia virus
  source 1..196535: mol_type = other DNA
  misc_feature 1..196535: note = VIR96
atcaaagagagaaagagaataaaaatatttttgtaaaactttttttatgagaccatcaaagagagaaagagaataaaaatatttttgtaaaactttttttatgagaccatcagaaagaggtttaatatttttgtgataccctgaaaggaaataggaataggaataggaatagtgtcataatcgtatcacactattgagacagaaaaagaagaagtcgcgagaggtaactttttgtgaatgtagttaagaacatttttgttttgcaaaccggaatatagtgtccggtacacttttttaattcgtggtgtgcctgaatcgttcgattaaccctactcatccaatttcagatgaatagagttatcgattcagacacacgctttgagttttgttgaatcgatgagtgaagtatcatcggttgcaccttcagatgccgatccgtcgacatacttgaatccatccttgacctcaagttcagatgattccttgcacatgtctccgatacgaacgctaaactctagattcttgacacattttgtatcgacgatcgttgaaccgatgatatcttcgtaactcactttcttatgagagatgttagacccgagtactggatgggtcttgatgtcgctgtctttctcttcttcgctacatctgatgtcgatagacacctcacagtctttgatcatagcaagagcttcttcatgagtgatcgcgggagagtccttaccttgtcctggggacacgctggacaatctagcattcactgtgtttccatcagcggattctgagatggatttaatctgaggacatttggtgaatccaaagttcattctcagacctccaccgatgatggagtaataagtggtaggaggatctacatcctcgactgatgtggaatcatcttctgattccacctcgggatttggatctgactcggactctgtaatttccgttacggattggcaaatcttatcattggtcggtgtttggtcttgctttgtgactttgataataacatcgattcccatatgatgtttgttttcttcttccgtacacgaggatgaggatgaggatgattgctgaagactggcaggcacatgcatgccaggacgatatattgtttcataattgctattgattgagtactgttctttatgattctacttccttaccatgcaataaattagaatatattttctacttttacgagaaattaattattgtatttattatttatgggtgaaaaacttactataaaaagcgggtgggtttggaattagtgatcagtttatgtatatcgcaactaccgggcatatggctatcgacatcgagaacattacccacatgataagagattgtatcagtttcgtagtcttgagtattggtattactatatagtatatagatgtcgacgctagatatacagtcgcccactagagttactgtctccgaatgcggcatgataccgtcatcattctttgctttcgttaactgtttggaggaagaatctttgttattgcatttaatctcgaaattcagagtgcacacctttctcctgtaaagaaacctgaagttgctaccttattaaggacagagaagtattcctcacgaaatacgggattacagtctttatgattcatagtaatagttagttccgacgttgagatggattcactgagaccggtagtggtcgtccgagtacacgacgtgtcgttgacgggatacagattaatttccacatcgatatagttaaaggtattactgggtacgggttcgcatttatctgcggaagagacggtgtgagaatatgttccgagaccacacggagaacagatgacgtctccggatactccgtatcctattccacattttgtttgggaaacacatgccttgcatccggatgatcctttgagaagacaataatatccgggagagcattcacagattctattgtgagtcgtgttacacgatcgcgtcttccgttacaacttagacaagcgggtaaatgattattgcgagatgtgaaggtacccgaaccacagggtgtacatcgtgtgttagtcttgctatcgcataatctggaagcgtatgttcccggacacaaattatggcgtttgtattcgttgtctttacactttccatcggatggtgcatgcggtgctatatctcttccgtttattattatacatgagagaaacaatatatacgagtataatacggacttcatgatttaataatgtagtaatcgtcgtcttgttcctgtttcctacttctccaatcatatagatattttctttctatcatggataatatttgtaatggttctttccgtacaacatactgtttagatgatattgcgcataatttccggaggcaaatacgatagtctagattgaccgatggtagactctaatttattgagtgctttgtcgacgagtttacttttatgctccatcgatagatggcactgttctatgagatcgtcgtacatgggaaatgaaatgtgtctgtccgaatgtatggctttaagatagctgtgataccgtatacaggtcggtgtcggagattcgaatctctttaaggcgacttatgtcacgatgatggaatctatcttatcgaatgatatatttttcataaatacacttttatagtcctcgtttaaacagaatttactatgtagttccgcgaatgactcgtcccttaataggcagtaggctagtatcttttttacgtagtaatcgtcgtagggagagaattctgacatcttgtagaacaacgatttaatcataggtagagatactttcagtctgtggtggatgatgtcattcacaacatccgccttgtatatgatgtttctgttttcaaacaccaagtcgaataccgtctttagtcggaaggttgatgtcgtatccgatgtatgaggcaacattgttgttacaattttgaaaggcggtattatagtattcgtctttctgaatgtcgaacctatctagtagataccgtagtatattgagagtgtatccttgattatgttttatgaatagataaagtagatgttgtccttcttccttttgttcgtgccaattgagtaacattatgagaatatgacctgttgcacaatcgttccatgatgggtgtacaatcaagattattacgtatcctcgtatcggctcctcgagataaaagagcatacaccacacgaggactatgtttggtatactgttgaaggtaagtgtgtaaccgcgttaatgtttgctccataatctattatcgcgtagatgaatcgcttctcggctcgcatcttagtgtgacttaacttgtaataattgcttttgtagaacgtggatatgtgtttacagtagtaatgaagagaagtgagtccatcctcgtcgacgcaattagggtcggatcctttgtacagaacgtaatagtttaagctcccattgaatttatatctaagataacacagcaatagatcggatgatttactaaagtcatcaatggtgtccgttagtatatcaaagatcttgttatcgattgatagtgaatgaatcagatagtggtgtagaggaatatgtcctttttcatccttgctatcaaagttacgcatgccgtggtgtaacaatatctttaatacagatggattaaatcgtgtattcatcgtatagcaatgtaatggagagttacctcgtttattcagatcgcagtgtttaataactagcttaaacagatgagacgatgtatccacatcaaagaacgtaaaatacatatgacaaacattgttgacagaaacgtgaccttcattcttaccgtcgtccataaatacgttaggtatgtaccacatactgtcgcgaacgatgcgtacaatctcgtccatctcataatgatttactttttcataattaaagatgtgaaagaaaaccgaacaatatatttttttagtaatgtttatgcgagacatataaaataaactccgtgtttatgatgccggtaaatgtttttatcatcttggacggaatcgattttgtaatatgtcatggaaacaaatgaaacaggacattatcgctccatgataaattatttaatggagtaataaagtatctccatgggtaatttcgaaatcaagttatcgtctgtattaatgttgtccactatggagtcgatcctctcattgttctttacagtttctgtaatgatggacgttagttcttttttgtaccatttgatgtcggattctttgcgtatctcaatctgtggcgtttgcttcgtttaaataatatatcaaacatggagacgcctgatatgtaggcattcttcattctattaatgtctactctatagcgctttagttccttatgacgaccggagatatcatacttactttagaaggaaaatcatcatctaggattaaggcgtatctgatacaggcgaataatggttcaggatatagatagcgtatatctctattaaatgcgtcaatcatagtctctagagtgggatggtagctaagtaataaatcaactatcctcgttttgttttctcttctgtaactacttttctggatggccgtattgattatcgagcgtgatgttgtaacactcgctccatattccaataaccgctttgcaaattgtatattattgacatcgaccgcgtaatatagtagagttttattctcattatcgatcatatctatattatccatgtacttgcttagtatatcaaatacatctattagtatggtttcataacagtgatacccgcaattattaaatctcgataatatcagaccgtacatacatagacggccattgttcgatacgtgatttacagccatgtgtccattattttccacgataaaccttacgacgtttacatcgacgagattattattaacaaagtagtcgtgcagaggatagttgttgtccgttatctaacatgcatcgaacgaccatatcgccgtaatgtaagtagtttatcaacatggcttgtacgatggattcatcctgttgtctaaatctctttagaatgttatcgatgatgtagtggttatagtctctggaatcgtaagaagtaatactacgcattacgtcgacaagagtatgacgtctctcaataagaagattaacgatttccatgtctacattatatggggttactctaaatcgcttgtttagataatccgcctctaatatagggctgacgtcgtatactctacacgtgtccacatcctttattaataatttaacaatctctatatctatggttgagcaagaccagtagtattggatgggtaaagatcctccttcgtctctgccatggatggaaacattgttattgatcaaacatttaattacatccttggatagagattgagattctctatgagacgatatatagtaatgaagagagttcttacacatatcactgtcgtacatacaggtacgaaatacgtaaccggtgctgtaacattctgatttaagaagccatagcaatacttctggtctcggattaggcgtcgttacgtatatatccaccaatccgagaccattgattgcataattcgtattcttggacggacgtatccgtttatccacaattaggtattttagcagacgtaagtcgatattatccgaagacatatacgaatacagatcgaaatcatttatattcgacttgagttcgttagaggaattcgaatagctggatatcagtagatgcacaatttgagattttacgtatctatgcttactgtatgctcctagcggagttaatccttcgttgtttctacaaagtctctcgactccgcgagagagtaacagtcgaacaatcttaatgtctgtatcgcatttattgaagacgtaacaatgtagcgcattgtttcctcgtctatctatatgttttgataagttgtgacacgtttcaatttctagttttatttttttgtacgtcacatcttcatccagtagacgacatagaatacatgtgcaatccatagctattctggtgctaattattcctatttcacgaaaaatgatgaaggcaatcattcctcataagatgataaaaagtgtagtgagagagcatgaaggagatttagtatttagcagtgcggatatgatccaagagggtgagatagtcgttctcgttcagaatctttcgcagcataagtagtatgtcgatatacttatcgttgaagactcttccagagacgatagctgattgagtacaaagtccaatgattgcacgaagttcttcggcggttttcatggagtcatttctgatgaaacatttaatgatctccacgcaattgtcgatattgtcccacggaagtgaatccttcaactcaccaccaaagagctccgttgcatcagttctgaaagagatgagaagcctgtagagagaccctgcgctttctctatgggtccatctatgagaaacccacaggatgtattcagtcagacaatgtctgacgtcggccacggtattcagggagtccttagtagcgtggcaatgacagggtctgaactgggcacaaggagaggccattgtaaaggtagacctgtagccgtttatgctaatagagggctttaatttccatttttttaatgggttgtggatgaggaatgagagtgatatcatattgagatacgtagttatgtagaggtgtatttcctatattatttactttcggtttcatattttaccaactctttaataaatttcttttcacgatgcatcttattaaatgacgttttctcataagtggacatatagatgcagaagtaatgaagaaaagtattacctctatcatctacataattagggtctgctcctttttttaacaacttatacagtacgtagtagtagtttatcggttttaaatcaagtctagaatatatagtggattaatatatttttatattagctaaagctatctatactatcagaaagcatatcattctcaacttcatcatgagttaaatatttgtgtaatggatgtcatgaacattaaacgtattcatgacatactcctttaataggttttttaaaacagatgattcaaatccttcattcattagataacagtgtaacggagtcgtaccttctactagtttgtttatatcacagcattctacaaacagtctaaacaatagagaagacggacagactttaacgtataaatgacacatgttatcgatattcgttgatgaattattattaaacgtagttatgataaatgattctaacgacatctctcgctagagataaaatctagtatcgtatcattaaacatctttgcatcatactcgcatagcatagtttttcataattaatacaatatttaaaagacttattcggaaagtattttaatacatgtatcatcgatggagatccatatgaggagtcacttgtagttcttcagtagtaataacagtgctatcatcgatagtataattatatgtagaaggttcatatgttgttgtaattggagtaactgttggtagttcttccgtggaatcaataattatactaacagcaatagtataattatataaatatgttccgttgatatcacatattttaatgaactcatttctaacaccctcagctatatctgtccaattaaatgtagccaacaatctactacgttctctttgattgactacttgtacggtagcgacgctacactatctttattgtcttctacatgctccaattgaatgtcatgatacaacgcagtttttcttatgcatgtttcataacaccacgaacatgtcgcagtaagatatatagccagagataatttctgtaaattcatgattgccggtcataaacaagcccgtcaataattgtggctatatattcagtttatagagcaaaataattaagcacaatagcgcttaatctcaaaatatgttatgtttatttttttcatattaaacatactggttaaaatcctctaaaggctgatcttcatctataaatcaagatcataattacatttagacagtggtttcatgtttataaaaatgttctttttgtgtgaataaggaatatactaatcaataatcaaccatcgaccccattacgatagtatgcaggcaaccccccattagagaggtacgtgtaatcagtctctccagttttagtatttttataagtcattgttacataaacggcttttaaacagtctcctcgataataagccatatctggaaatttattaaatactcgagtcattttacgcacggtcaaaaaagtaagtaatgtcgacgacttcttacattctatagaaacacctagaatactcattttcttttggaaaatatcctcagactctgatttgaacaatgcacgacctatagtaaaccgtgaccaataagttatattagtcaatggtatatccaaaccatcaggtgtggatagtacgccgatagtccagtctttggtatcgatagtgtagttattgaactgagaagttaccgtatagtctttttggtcatctctaaacaaggaaactaatacctctacactattgaacgatttatcttccgtaatgggtggaataacgggaatataaagtggactagcgatggatgaagtcacgaatataagacacgctattaatccgtatatcatcattttgatattacttataataacgatttgtttaatttttagtttatactattaattgtaaatgatattattatttttttaagtattatcagctttagtttatactattactatttgtaatatttagacatagataaacgtgataaaagtctatttgtttatatttattgcggatagcagtatttccctataaaaagtatacgtcctgtgttgtctttaatcatgtacatgaatggatggtttatgtagaccttcgtacgatataccatcgaaaagttagtcataaatactcctgtaacggccgatgcttctgtatactcctcattaacatctataaacgtcgtatgtagaaatttttctacagtgatagtttcattacacatcttgctaaaatctgcataatatccgaatatattagtaagtcctaaattttctaaaatcggtaccagattatacggttctgtcatttccactttaaactttggcatatacaagtctatacttttagtagataacataccacaccattttttaaatttttcatctgttatatttttttctatgttatatataccttctatgtcgtccggtagtataattaccatactagagtttccctcgtatggaatatcgataatagagaatcctccgaataattcattaatatgtacatattgcaagttattctcggtacccaccatcatatcaacactggtaactatattcttagaaatataaaacttgtctgtatatgtaagatgtttagaaaatggatatttccacattgctttaaaatggacggcgctaacaactgtcatacgagtattaatggatagcggactagtcaataaggaattaattttaccatttgtcatcgtcttaacccattcgttgattagttcctttgtttggttagcattattaaagtttacagtttgaaaatcgtcttttattttttgtaggaaggaggcgtggaactcgatactatcgctaccgtatattttatttgcggtagctagtgtcgcacaatacggaatatctacgtccatgtcattattgtcatccttcttatcatcgggtgtattctcattcatattctctatatattttgatagttgttcagctgtagaaccagctgctccatgatttagaatagataaagtagataaaatagaaactggagaaatcaaaacattttcatcagggtgttttaagattagttctttaaagatatccatggtatagaccaaacaataacgataacgatatatatcataaataaataatgttaaatttcagtttatgtttgtaccccgtattcatacttaacaaattggtattgcgtacacaatcaatcatattacataccattaataatgcaagcataaaaaatcgttagtagatgtttctaaatataggttccgtaagcaaagaatataagaatgaagcggtaatgataaaatcaatcgttatctaaaatgatcatactcatttattttattctattatattaacacatacatttttaacagcaacacattcaatattgtattgttatttttatattatttacacaattaacaatatattattagtttatattactgaattaataatataaaattcccaatcttgtcataaacacacactgagaaacagcataaacacaaaatccatcaaaaatgtcgatgaaatatctgatgttgttgttcgctgctatgataatcagatcattcgccgatagtggtaacgctatcgaaacgacattgccagaaattacaaacgctacaacagatattccagctatcagattatgcggtccagagggagatggatattgtttacacggtgactgtatccacgctagagatatcgacggtatgtattgtagatgctctcatggttatacaggcattagatgtcagcatgtagtattagtagactatcaacgttcagaaaaaccaaacactacaacgtcatatatcccatctcccggtattgtgcttgtattagtaggcattattattatgtgttgtctattatctgtttataggttcactcgaagaactaataaactacctctacaagatatggttgtgccataatttttataaatttttttatgagtatttttacaaaaaaaatgtataaagtgtatgtcttatgtatatttataaaaatgctaagtatgcgatgtatctatgttatttgtatttatctaaacaatacctctacctctagatattatacaaaaattttttatttcggcatattaaagtaaaatctagttaccttgaaaatgaatacagtgggtggttccgtatcaccagtaagaacataatagtcgaatacagtatccgattgagattttgcatacaatactagtctagaaagaaatttgtaatcattttctgtgacgggagtccatatatctgtatcatcgtctagtttatcagtgtcccatgctatatttctgttatcatcattagttaatgaaaataactctcgtgcttcagaaaagtcaaatattgtatccatacatacatctccaaaactatcgcttatacgtttatctttaacgatacctatacctagatggttatttactaacagacattttccagatctattgactataactcctatagtttccacatcaaccaagtaatgatcatctattgttatataacaataacataactcttttccatttttatcagtatgtatatctatatcaacgtcgtcgttgtagtgaatagtagtcattgatctattatatgaaacggatatgtctagaacggcaattgtcttacgtccagttaacactttcgttgatttaaagtctagagtctttgcaaacataatatccttatccgactttatatttcctgtagggtggtataattttattttgcctccacatatcggtgtttccaaatatattactagacaatattccatatagttattagttaagggtacccaattagaacacgtacgcttattatcatcatttggatcgtatttcataaaagttattgtactatcgatgtcaacacattctacattttttaatcgtctatatagtatttttctgatattttctataatatcagaattgtcttccatcggaagttgtatactatcggaatcagttacatgtttaaataattctctgatgtcattccttatacaatcaaattcattattaaacagtttaatagtctgtagacctttatcgtcgtaaatatccattgtcttattagttacgcttatttttatgtgttttacgttgctttattatattttataagaatgattgtttgacgaatcacgagaactattaagacacattattaggtatatattataaaaaagtttttgattacgatgttataagaggaaagaggacacattaacatcatacatcaattaactacattcttataacatcgtaatcaaaagaattgcaattttgatgtataacaactgtcaatgggttatggaattgtatattacatattatacggtatgttggtaacgacaaataccgatcggtaatcgtttgccggtgtaatagaattatatatatctatctattacaccggctgagtatacataataataagttgtggtagtatgatctccatatttataatttaggactttgtattcagtatttttggaatcataaaaaataaaaaaaagttttactaatttaaaatttaaaaagtatttacatttttttcactgtttagtcgcggatatggaattcgatcctgccaaaatcaatacatcatctatagatcatgtaacaatattacaatacatagatgaaccaaatgatataagactaacagtatgcattatccgaaatattaataacattacatattatatcaatatcacaaaaataaatacacatttggctaatcaatttcgggcttggaaaaaacgtatcgccggaagggactatatgactaacttatctagagatacaggaatacaacaatcaaaacttactgaaactatacgtaactgtcaaaaaaatagaaacatatatggtctatatatacactacaatttagttattaatgtggttattgattggataaccgatgtgattgttcaatcaatattaagagggttggtaaattggtacatagctaataatacctatactccaaatacacccaataatacaacaaccatttctgagttggatatcatcaaaatactaaataaatacgaggacgtgtatagagtaagtaaagaaaaagaatgtggaatttgctatgaagttgtttactcaaaacgattagaaaacgatagatactttggtttattggattcgtgtactcatatattttgcataacatgcatcaatatatggcataaaacacgaagagaaaccggtgcgtcggataattgtcctatatgtcgtacccgttttagaaacataacaatgagcaagttctataagctagttaactaataaataaaaagtttaatttgttgacgacgtatgtcgttattttttctcgtataaaagattaatttgattctaatataatctttagtattggataaatatcaattcaaattaattccattagattatatcataaataaaaatagtagcacgcactacttcagccaaatattcttttttgaaacgccatctatcgtagtgaggacacaagtgaacctataatgagcaaatttattagtatcggttacatgaaggactttacgtagagtggtgattccactatctgtggtacgaacggtttcatcttctttgatgccatcacccagatgttctataaacttggtatcctcgtccgatttcatatcctttgccaaccaatacatatagctaaactcaggcatatgttccacacatcctgaacaatgaaattctccagaagatgttacaatgtctagatttggacatttggtttcaaccgcgttaacatatgagtgaacacacccatacatgaaagcgatgagaaataggattttcatcttgccaaaatatcactagaaaaaatttatttatcaattttaaaggtataaaaaatacttattgttgctcgaatattttgtatttgatggtatacggaagattagaaatgtaggtattatcatcaactgattctatggttttatgtattctatcatgtttcactattgcgttggaaataatatcatatgcttccacatatattttattttgttttaactcataatactcacgtaattctggattattggcatatctgtgaataattttagctccatgatcagtaaatattaatgagaacatagtattaccacctaccattatttttttcatttcgttcaattcttgattgcaaagatctatataatcattatagcgttgacttatggactctggaatcttagacgatgtacagtcatctataatcatggcatatttaatacattgttttatagcatagtagttatctacgatgttagatatttctctcaatgaatcaatcacacaatctaatgtaggtttatgacataatagcattttcagcagttcaatgtttctagattcgttgatggcaatggctatacatgtatatccgttatttgatctaatgttgacatctgaaccggattctagcagtaaagatactagagattgtttattatatctaacagccttgtgaagaagtgtttctcctcgtttgtcaatcatgttaatgtctttaagataaggtaggcaaatgtttatagtactaagaattgggcaagcataagacatgtcacaaagaccctttttgtatgtataagtgtagaaattataacatccatagttggatttacataggtgtccaatcgggatctctccatcatcgagatgattgacggcatctcccccttccttttttagtagatatttcatcgtgtaagaatcaatattaatatttctaaagtatccgtgtatagcctctttatttaccacagctccatattccaacatgcattccactaaagggatatcgatatcgccgaatgtcatatactcaattagtatatgttggaggacatccgagttcattgttttcaatatcaaagagatggtttccttatcatttctccatagtggtacaatactacacattattccgtgaggctttccattctccaaaaacaatttgaccaaatctacatctttattgtatctataatcactatttagataatcagccataattcctcgagtgcaacatgttagatcgtctatatatgaataagccgtgttatctattcctttcattaacaatttaacgatgtctatatctatatgagatgacttaatataatattgaagagctgtacaatagtttttatctatagaagacggcttgattccgtgattaattagacatttaacaacttccggacgcacatatgctctcgtatccgactctgaatacagatgagagatgatatacagatgcaatacggtaccgcaatttcgtagttgataatcatcatacgcgtatccgtactcgtcctcataaagaacactgcagccattttctatgaacaaatcaataattttaggaacaggatcattgtcattacataattttctataactgaacgatggttttcacatttaacactcaagtcaaatccatgttctaccaacacctttatcaagtcaacgtctacatttttggatttcatatagctgaatatattaaagtcatttatgttgctaaatccagtggcttctagtagagccatcgctatatcctttaactttaacatgtctactatttgtgtattcttctaatggggtagctgtctccaatttttgcgtaatggattagtgccactgtctagtagtagtttgacgacctcgacattattacaatgctcattaaaaaggtatgcgtgtaaagcattattcttgaattggttcctggtatcattaggatctctgtctctcaacatctgtttaagttcatcgagagccacctcctcattttccaaatagtcaaacattttgactgaatagaagtgaatgagctactgtgaactctatacacccacacaactaatgtcattaaatattatttttttgaatgtatttataccatgtcaaaaacttgtacaattattaataaaaataatttagtgtttaaattttaccagttccagattttacacctccgttaaccccactttttacaccactggacgaccctcctccccacattccaccgccaccagatgtataagttttagatcctttattactaccatcatgtccatggataaagacactccacatgccgccactaccccctttagaagacatattaataagacttaagagttaaggacaagtttaacaataaaattaatcacgagtaccctactaccaacctacactattatatgattatagtttctatttttacagtaccttaactaaagtttctagtcacaagagcaatactaccaacctacactattatatgattatagtttctatttttataggaacgcgtacgagaaaatcaaatgtctaatttctaacggtagtgttgataaacgattatcgtcaatggatacctcctctatcatgtcgtctattttcttactttgttctattaacttattagcattatatattatttgattataaaacttatattgcttattagcccaatctgtaaatatcggattattaacatatcgtttctttgtaggtttatttaacttgtacatcactgtaagcatgtccgtaccatttattttaatttgacgcatatccgcaatttctttttcgcagtcggttataaattctatatatgatggatacatgctacatgtgtacttataatcgactaatatgaagtacttgatacatattttcagtaacgatttattattaccacctatgaataagtacctgtgatcgtctaggtaatcaactgttttcttaatacattcgatggttggtaatttactcagaataatttccaatatcttaatatataattctgctatttctggaatatatttatctgccagtataacacaaatagtaatacatgtaaacccatattttgttattatattaatgtctgcgccattatctattaaccattctactaggctgacactatgcgacttaatacaatgataaagtatactacatccatgtttatctattttgtttatatcatcaatatacggcttacaaagttttagtatcgataacacatccaactcacgcatagagaaggtagggaataatggcataatatttattaggttatcatcattgtcattatctacaactaagtttccattttttaaaatatactcgacaactttaggatctctattgccaaatttttgaaaatatttatttatatgcttaaatctatataatgtagctccttcatcaatcatacatttaataacattgatgtatactgtatgataagatacatattctaacaatagatcttgtatagaatctgtatatcttttaagaattgtggatattaggatattattacgtaaactattacacaattctaaaatataaaacgtatcacggtcgaataatagttgatcaactatataattatcgattttgtgatttttcttcctaaactgtttacgtaaatagttagatagaatattcattagttcatgaccactatagttactatcgaataacgcgtcaaatatttcccgtttaatatcgcatttgtcaagataataatagagtgtggtatgttcacgataagtataataacgcatctctttttcgtgtgaaattaaatagtttatcacgtccaaagatgtagcataaccatcttgtgacctagtaataatataataatagagaactgttttacccattctatcatcataatcagtggtgtagtcgtaatcgtaatcgtctaattcatcatcccaattataatattcaccagcacgtctaatctgttctattttgatcttgtatccatactgtatgttgctacatgtaggtattcctttatccaataatagtttaaacacatctacattgggatttgatgttgtagcgtatttctctacaatattaataccatttttgatactatttatttctatacctttcgaaattagtaatttcaataagtctatatcgatgttatcagaacatagatattcgaatatatcaaaatcattgatatttttatagtcgactgacgacaataacaaaatcacaacatcgtttttgatattattatttttcttggtaacgtatgcctttaatggagtttcaccatcatactcatataatggatttgcaccactttctatcaatgattgtgcactgctggcatcgatgttaaatgttttacaactatcatagagtatcttatcgttaaccatgattggttgttgatgctatcgcattttttggtttctttcatttcagttatgtatggatttagcacgtttgggaagcataagctcatatgatttcagtactgtagtgtcagtactattagtttcgatcagatcaatgtctagatctatagaatcaaaacacgataggtcagaagataatgaatatctgtaggcttcttgttgtactgtaacttctcgttttgttagatggttgcatcgtgctttaacatcaatggtacaaattttatcctcgctttgtgtatcatattcgtccctactataaaattgtatattcagattatcatgagatgtgtatacgctaacggtatcaataaacggagcacaccatttagtcataaccgtaatccaaaaatttttaaagtatatcttaacgaaagaagttgtgtcattgtctacggtgtatggtactagatcctcataagtgtatatatctagagtaatgtttaatttatcaaatggttgataatatggatcctcatggcaatttcctaagacgaaaataagacataaacacgcaataaatctaattgcggacatggttactccttaaaaaaatactaataatcaccttggctatttagtaagtgtcatttaacactatactcatattaatccatggactcataatctctatacgggattaacggatgttctatatacggggatgagtagttctcttctttaactttatactttttactaatcatatttagactgatgtatgggtaatagtgtttgaagagctcgttctcatcatcagaataaatcaatatctctgtttttttgttatacagatgtattacagcctcatatattacgtaatagaacgtgtcatctaccttattaactttcaccgcatagttgtttgcaaatacggttaatcctttgacctcgtcgatttccgaccaatctgggcgtataatgaatctaaactttaatttcttgtaatcattcgaaataatttttagtttgcatccgtagttatcccctttatgtaactgtaaatttctcaacgcgatatctccattaataatgatgtcgaattcgtgctgtatacccatactgaatggatgaacgaataccgacggcgttaatagtaatttactttttcatctttacatattgggtactagttttactatcataagtttataaattccacaagctactatggaataagccaaccatcttagtataacacacatgtcttaaagtttattaattaattacatgttgttttatatatcgctacgaatttaaacagagaaatcagtttaggaaaaaaaattatctatctacatcatcacgtctctgtattctacgatagagtgctactttaagatgagacatatccgtgtcatcaaaaatatactccattaaaatgattattccggcagcgaacttgatattggatatatcacaacctttgttaatatctacgacaatagacagcagtcccatggttccataaacagtgagtttatctttctttgaagagatattttgtagagatcttataaaactgtcgaatgacatcgcatttatatctttagctaaatcgtatatgttaccatcgtaatatctaaccgcgtctatcttaaacgtttccatcgctttaaagacgtttccgatagatggtctcatttcatcagtcatactgagccaacaaatataatcgtgtataacatctttgatagaatcagactctaaagaaaacgaatcggctttattatacgcattcatgataaacttaatgaaaaatgtttttcgttgtttaagttggatgaatagtatgtcttaataattgttattatttcattaattaatatttagtaacgagtacactctataaaaacgagaatgacataactaatcataactagttatcaaagtgtctaggacgcgtaattttcatatggtatagatcctgtaagcattgtctgtattctggagctattttctctatcgcattagtgagttcagaatatgttataaatttaaatcgaataacgaacataactttagtaaagtcgtctatattaactcttttattttctagccatcgtaataccatgtttaagatagtatattctctagttactacgatctcatcgttgtctagaatatcacatactgaatctacatccaattttagaaattggtctgtgttacatatctcttctatattattgttgatgtattgtcgtagaaaactattacgtagaccattttctttataaaacgaatatatagtactccaattatctttaccgatatatttgcacacataatccattctctcaatcactacatctttaagattttcgttgttaagatatttggctaaactatataattctattagatcatcaacagaatcagtatatatttttctagatccaaagacgaactctttggcgtcctctataatattcccagaaaagatattttcgtgttttagtttatcgagatctgatctgttcatatacgccatgattgtacggtacgttatgataaccgcataaaataaaaatccattttcatttttaaccaatactattcataattgagattgatgtaatactttgttactttgaacgtaaagacagtacacggatccgtatctccaacaagcacgtagtaatcaaatttggtgttgttaaacttcgcaatatttatcaatttagatagaaacttatactcatcatctgttttaggaatccatgtattattaccactttccaacttatcattatcccaggctatgtttcgtccatcatcgttgcgcagagtgaataattcttttgtattcggtagttcaaatatataatccatgcatagatcggtaaagctattgtagatgtgatttttcctaaatctaatataaaactcgtttactagcaaacactttcctgatttatcgaccaagacacatatggtttctaaatctatcaagtggtggggatccatagttatgacgcagtaacatagattattaccttcttaactgtcgctaatatctatatatttattgttatcgtattggattctgcatatagatggcttgtatgtcaaagatatagaacacataaccaatttatagtcgcgctttacattctcgaatctaaagttaagagatttagaaaacattatatcctcggatgatgttatcactgtttctggagtaggatatattaaagtctttacagatttcgtccgattcaaataaatcactaaataatatcccacattatcatctgttagagtagtatcattaaatctattatattttatgaaagatatatcactgctcacctctatatttcgtacatttttaaactgtttgtataatatctctctgatacaatcagatatatctattgtgtcggtagacgataccgttacatttgaattaatggtgttccattttacaacttttaacaagttgaccaattcatttctaatagtatcaaacgctccatgattaaatattttaatagtatccattttatatcactacggacacaaagtagctgacataaaccattgtataatttttatgttttatgtttattagcgtacacattttggaagttccggcttccatgtatttcctggagagcaagtagatgatgaggaaccagataggttatatccgtacttgcacttaaagtttacattgtcgttgtatgagtatgatcttttaaacccgctagacaagtatccgtttgatattgtaggatgtggacatttaacaatctgacacgtgggtggatcggaccattctcctcctgaacacaggacaccagagttaccaatcaacgaatatccactattgcaactataagttacaacgcttccatcggtataaaaatcctcgtatccgttatgtcttccgttggatatagatggaggggattggcatttaacagattcacaaataggtgcctcgggattccataccatagatccagtagatcctaattcacaatacgatttagattcaccgatcaaatgatatccgctattacaagagtacgttatactagagccaaagtctactccgccaatatcaagttggccattatcgatatctcgaggcgatgggcatctccgtttaatacattgattaaagagtgtccatccagtacctgtacatttagcatatataggtcccattttttgctttctgtatccaggtagacatagatattctatagtgtctcctatgttgtaattagcattagcatcagtctccacactattcttaaatttcatattaatgggtcgtgacggaatagtacagcatgatagaacgcatcctattcccaacaatgtcaggaacgtcacgctctccaccttcatatttatttatccgtaaaaatgttatcctggacatcgtacaaataataaaaagcccatatatgttcgctattgtagaaattgtttttcacagttgctcaaaaacgatggcagtgacttatgagttacgttacactttggagtctcatctttagtaaacatatcataatattcgatattacgagttgacatatcgaacaaattccaagtatttgattttggataatattcgtattttgcatctgctataattaagatataatcaccgcaagaacacacgaacatctttcctacatggttaaagtacatgtacaattctatccatttgtcttccttaactatatatttgtatagataattacgagtctcgtgagtaattccagtaattacatagatgtcgccgtcgtactctacagcataaactatactatgatgtctaggcatgggagacttttttatccaacgatttttagtgaaacattccacatcgtttaatactacatatttttcatacgtggtataaactccacccattacatatatatcatcgtttacgaataccgacgcgcctgaatatctaggagtaattaagtttggaagtcttatccatttcgaagtgccgtgtttcaaatattctgccacacccgttgaaatagaaaattctaatcctcctattacatataactttccattgttaacacaagtactaacttctgattttaacgacgacatattagtaaccgttttccattttttcgtttcaagatctacccgcgatacggaataaacatgtctattgttaatcatgccgccaataatgtatagacaattatgtaaaacatttgcattatagaattgtctatctgtattaccgactatcgtccaatattctgttctaggagagtaatgggttattgtggatatataatcagagtttttaatgactactatattatgttttataccatttcgtgtcactggctttgtagatttggatatagttaatcccaacaatgatatagcattgcgcatagtattagtcataaacttgggatgtaaaatgttgatgatatctacatcgtttggatttttatgtatccactttaataatatcatagctgtaacatcctcatgatttacgttaacgtcttcgtgggataagatagttgtcagttcatcctttgataattttccaaattctggatcggatgtcaccgcagtaatattgttgattatttctgacatcgacgcattatatagttttttaattccatatcttttagaaaagttaaacatccttatacaatttgtggaattaatattatgaatcatagtttttacacatagatctactacaggcggaacatcaattattatggcagcaactagtatcatttctacattgtttatggtgatgtttatcttcttccagcgcatatagtctaatagcgattcaaacgcgtgatagtttataccattcaatataatcgcttcatcctttagatggtgatcctgaatgcgtttaaaaaaattatacggagatgccgtaataatttccttattcacttgtataatttccccattgatagaaaatatcacgctttccattcttgaagtactataagtaattatagtataatgtaaaggtttatatattcaatattttttataaaaaaatcatttcgacattaattcctttttaaatttccgtctatcatctatagaaacatattctatgaatttataaaatgcttttacgtgtcctatcgtaggcgatagaaccgctaaaaagcctattgaatttctacaaaagaatctattatatggtatagggagagtataaaacattaaatgcccgtacttattaaagtattcagtagccaatcctaactctttcgaatacttattaatggctcttgttctgtacgaatctatttttttgaacaacggacctagtggtatatcttgttctatgtatctaaaataatgtctgactagatccgttagtttaatatcctcagtcatcttgtctagaatggcaaatctaactgcgggtttaggctttagtttagtttttatatctacatctatgtctttatctaacaccaaaaatataatagctaatattttattacaatcatccggatattcttctacgatctcactaactaatgtttctttggttatactagtatagtcactatcggacaaataaagaaaatcagatgatcgatgaataatacatttaaattcatcatctgtaagatttttgagatgtctcattaaaatattattagggtcagtactcattatcattaggcagctattacttattttattatttttcaccatatagatcaatcattagatcatcaaaatatgtttcaatcatcctaaagagtatggtgaatgactcttcccatctaatttctgaacgttcaccaatgtctctagccactttggcactaatagcgatcattcgcttagcgtcttctatattattaactggttgattcaatctatctagcaatggaccgtcggacagcgtcattctcatgttcttaatcaatgtacatacatcgccgtcatctaccaattcatccaacaacataagctttttaaaatcatcattataataggtttgatcgttgtcatttctccaaagaatatatctaataagtagagtcctcatgcttagtaatttaactattttagttaacaactattttttatgttaaatcaattagtacaccgctatgtttaatacttattcatattttagtttttaggattgagaatcaatacaaaaattaatgcatcattaattttagaaatacttagtttccacgtagttaatgaaacatttgaactcatcgtacaagacgttctcgtacaggacgtaactataaaccggtttatatttgttcaagatagatacaaatccgataactttttttacgaattctacgggatccactttaaaagtgtcataccgggttctttttatttttttaaacagatcaatggtgtgatgttgattaggtcttttacgaatttgatatagaatagcgtttacatattctccataatggtcaatcgccatttgttcgtatgtcataaattctttaattatatgacactgtgtattgtttagttcatccttgttcattgttaggaatctatccaaaatggcaattatactagaactataggtgcgttgtatacacatattgatgtgtctgtttatacaatccatgatatttggatccatgctactaccttcgggtaaaattgtagcatcatataccatttctagtactttaggttcattattatccattgcagaggacgtcatgatcgcatcctaaaaaaatatattatttttatgttattttgttaaaaataatcatcgaatacttcgtaagatactccttcatgaacataatcagttacaaaacgtttatatgaagtaaagtatctacgatttttacaaaagtccggatgcataagtacaaagtacgcgataaacggaataataatagatttatctagtctatctttttctatagctttcatagttagatacatggtctcagaagtaggattatgtaacatcagcttcgataaaatgactgggttatttagtcttacacattcgctcatacatgtatgaccgttaactacagagtctacactaaaatgattgaacaatagatagtctaccattgtttcgtattcagatagtacagcgtagtacatggcatcttcacaaattatatcattgtctaatagatatttgacgcatcttatggatcccacttcaacagccatcttaaaatcggtaaaatcatattgctttcctttatcattaataatttctaaaacatcatctctatcataaaagatacaaatattaactgtttgatccgtaataacattgctagtcgatagcaatttgttaataagatgcgctgggctcaatgtcttaataagaagtgtaagaggactatctccgaatttgttttgtttattaacatccgttgatggaagtaaaagatctataatgtctacattcttgactgttttagagcatacaatatggagaggtgtatttccatcatgatctggttttgagggactaattcctagtttcatcatccatgagattgtagaagcttttggattgtctgacataagatgtctatgaatatgatttttgccaaatttatccactatcctggcttcgaatccgatggacattatttttttaaacactctttctgaaggatctgtacacgccaacaacggaccacatccttcttcatcaaccgagttgttaatcttggctccatactgtaccaataaatttattctctctatgacttcatcatctgttcccgagagataatatagaggcgttttatgctgtttatcacacgcgtttggatctgcgccgtgcgtcagcagcatcgcgactattctattattattaattttagaagctatatgcaatggataatttccatcatcatccgtctcatttggagagtatcctctatgaagaagttcttcgacaaatcgttcatctagtcctttaattccacaatacgcatgtagaatgtgataattatttccagaaggttcgatagcttgtagcatattcctaaatacatctaaatttttactattatatttggcataaagagatagataatactcggccgacataatgttgtccattgtagtataaaaattaatatttctatttctatttctgtatatttgcaacaatttactctctataacaaatatcataacttagttcttttatgtcaagaaggcactggtttagttcatctataaatgtcacgccataactaccacgcatgctatactcagaattatgataaagatatttatccttggggtgtaggtaatggggattaatctttgttggatcagtctctaagttaacacatgtcacacatgatccatttatagttatatcacacgatgatgatttatgaattgattccggaagatcgctatcgtattttgtggttccacaattcatttccatacatgttattgtcacactaatattatgatgaactttatctagccgctgagtggtaaacaacagaacagatagtttattatctttaccaacaccctcagccgctgccacaaatctctgatccgtatccatgatggtcatgtttatttctagtccgtatccagtcaacactatgttagcatttctgtcgatatagctttcactcatatgacactcaccaataatagtagaattaatgtcgtaatttacaccaatagtgagttcggcggcaaagtaccaataccggtaatcttgtcgaggaggacatatagtattcttgtattctaccgaatacccgagagatgcgatacaaaagagcaagactaatttgtaaaccatcttactcaaaatatgtaacaatagtacgatgcaatgagtaagacaataggaaatctatcttatatacacataattattctatcaattttaccaattagttagtgtaatgttaacaaaaatgtgggagaatctaattagtttttctttacacaattgacgtacatgagtctgagttccttgtttttgctaattatttcatccaatttattattcttgactatatcgagatcttttgtataggagtcagacttgtattcaacatgcttttctataatcattttagctatttcggcatcatccaatagtacattttccagattagcagaatagatattaatgtcgtatttgaacagagcctgtaacatctcaatgtctttattatctatagccaatttaatgtccggaatgaagagaagggaattattggtgtttgtcgacgtcatatagtcgagcaagagaatcatcatatccacgtgtccattttttatagtggtgtgaatacaactaaggagaatagccagatcaaaagtagatggtatttctgaaagaaagtatgatacaatacttacatcattaagcatgacggcatgataaaatgaagttttccatccagttttcccatagaacatcagtctccaatttttcttaacaaacagttttaccgtttgcatgttaccactatcaaccgcataatacaatgcagtgtttcccttgtcatcaaattgtgaatcatccagtccactgaatagcaaaatctttactattttggtatcttccaatgtggctgcctgatgtaatggaaattcattctctagaagatttttcaatgctccagcgttcaacaacgtacatactagacgcacgttattatcagctattgcataatacaaggcactatgtccatggacatccgccttaaatgtatctttactagagagaaagcttttcagctgcttagacttccaagtattaattcgtgacagatccatgtctgaaacgagacgctaattagtgtatattttttcattttttataattttgtcatattgcaccagaattaataatatctctaatagatctgattagtagatacatggctatcgcaaaacaacatatacacatttaataaaaataatatttattaagaaaattcagatttcacgtacccatcaatataaataaaataatgattccttacaccgtacccatattaaggagattccaccttacccataaacaatataaatccagtaatatcatgtctaatgatgaacacaaatggtgtattaaattccagtttttcaggagatgatctcgccgtagctaccataatagtagatgcctctgctacagttccttgttcgtcgacatctatctttgcattctgaaacattttataaatatataatgggtccctagtcatatgtttaaacgacgcattatctggattaaacatactaggagccatcatttcggctatcgacttaatatccctcttattttcgatagaaaatttagggagtttaagattgtacactttattccctaattgaaacgaccaatagtctaattttgcagccgtaatagaatctgtgaaatgggtcatattatcacctattgccaggtacatactaatattagcatccttatacggaaggcgtaccatgtcatattctttgtcatcgattgtgattgtatttccttgcaatttagtaactacgttcatcatgggaaccgttttcgtaccgtacttattagtaaaactagcattgcgtgttttagtgatatcaaacggatattgccatgtacctttaaaatatatagtattaatgattgcccatagagtattattgtcgagcatattagaatctactacattagacataccggatctacgttctactatagaattaattttattaaccgcatctcgtctaaagtttaatctatataggccgaatctatgatattgttgataatacgacggtttaatacacacagtattatctacgaaactttgataagttagatcagtgtacgtatatttagatgttttcagcttagctaatcctgatattaattctgtaaatgctggacccagatctctttttctcaaatccatagtcttcaataattctattctagtattacctgatgcaggcaatagcgacataaacatagaaaacgaatagccaaacggcgagaagacaatattatcatcttgaatatttttatacgctactataccggcattggtaaatccttgcagacgataggtagacgctgaacacgttaacgatagtatcaataacgcaatcatgattttatggtattaataattaaccttatttttatgttcggtataaaaaaattattgatgtctacacatccttttgtaattgacatctatatatccttttgtataatcaactctaatcactttaacttttacagttttccctaccagtttatccctatattcaacatatctatccatatgcatcttaacactctctgccaagatagcttcagagtgaggatagtcaaaaagataaatatatagagcataatccttctcgtatactctgccctttattacatcgcccgcattgggcaacgaataacaaaatgcaagcatcttgttaacgggctcgtaaattgggataaaaattatgtttttatatctattttattcaagagaatattcaggaatttctttttccggttgtatctcgtcgcagtatatatcatttgtacattgtttcatattttttaatagtttacaccttttagtaggactagtatcgtacaattcatagctgtattttgaattccaatcacgcataaaaatatcttccaattgttgacgaagacctaatccatcatccggtgtaatattaatagatgctccacatgtatccgtaaagtaatttcctgtccaatttgaggtacctatataggccgttttatcggttaccatatatttggcatggtttaccctagaatacggaatgggaggatcagcatctggtacaataaatagctttacttctatatctatgtttttagattttagcatagcgatagatcttaaaaagtttctcatgataaacgaagatcgttgccagcaactaatcaatagcttaacggatacttgtctgtctatagcggatcttcttaattcatcttctatataaggccaaaacaaaattttacccgccttcgaataaataatagggataaagttcataacagatacataaacgaatttactcgcatttctaatacatgacaataaagcggttaaatcattggttctttccatagtacatagttgttgcggcgcagaagcaataaatacagagtgtggaacaccacttacgttaatactaagaggatgatctgtattataatacgacggataaaagtttttccaattatatggtagattgttaactccaagataccagtatacctcaaaaatttgagtgagatccgctgccaagttcctattattgaagatcgcaatacccaattctttgacctgagttagtgatctccaatccatgttagcgcttcctaaataaatatgtgtattatcagatatccaaaattttgtatgaagaactcctcctaggatatttgtaatatctatgtatcgtacttcaactccggccatttgtagtctttcaacatcctttaatggtttgttagatttattgacggctactctaactcttactcctcttttgggtaattgtacaatctcgtttaatattatcgtgccgaaattcgtacccacttcatccgataaactccaataaaaagatgatatatctagtgtttttgtggtattggatagaatttccctccacatgttaaatgtagacaaatatactttatcaaattgcatacctataggaatagtctctgtaatcactgcgattgtattatccggattcattttatttgttaaaaaataatcctatatcacttcactctattaaaaatccaagtttctatttctttcatgactgattttttaacttcatccgtttccttatgaagatgatgtttggcaccttcataaatttttatttctctattacaatttgcatgttgcatgaaataatatgcacctaaaacatcgctaatctcattgtttgttccctggagtatgagagtcgggggggtgttaatcttggaaattatttttctaaccttgttggtagccttcaagacctgactagcaaatccagccttaattttttcatgattgattaatgggtcgtattggtatttataaactttatccatatctctagatactgattctggacatagctttccgactggcgcatttggtgtgatggttcccataagtttggcagctagcagattcagttttgaaacagcatctgcattaactagaggagacattagaatcattgctgtaaacaagtttggattatcgtaagaggctagtatagaaattgttgctcccatggaatgacccaataagtagatttaatagttaccacgtgctgtaccaaagtcatcaatcatcattttttcaccattacttcttccatgtccaatatgatcatgtgagaatactaaaattcctaacgatgatatgttttcagctagttcgtcataacgtccagaatgtttaccagctccatgacttatgaatactaatgccttaggatatgtaataggtttccaatatttacaatatatgtaatcattgtccagattgaacatacagtttgcactcatgattcacgttatataactatcaatattaacagttcgtttgatgatcatattatttttatgttttattgataattgtaaaaacatacaattaaatcaatatagaggaaggagacggatactgtcttttgtgagatagtcatggcgactaaatcagattatgaggatgctgttttttactttgtggatgatgataaaatatgtagtcgcgactccatcatcgatctaatagatgaatatatcacgtggagaaatcatgttatagtgtttaacaaagatattaccagttgtggaagactgtacaaggaattgatgaagttcgatgatgccgctatacagtactatggtattgataaaattaatgagattgtcgaagctatgagcgaaggagaccactacatcaattttacaaaagtccatgatcaggaaagtttattcgctaccataggaatatgtgctaaaatcactgaacattggggatacaaaaagatttcagaatctagattccaatcattgggaaacattacagatctgatgaccgacgataatataaacatcttgatactttttctagaaaaaaaattgaattgatgatataggggtcttcataacgcataattattacgttagcattctatatccgtgttaaaaaaaattatcctatcatgtatttgagagttttatatgtagcaaacatgatagctgtgatgccaataagctttagatattcacgcgtgctagtgttagggatggtattatctggtggtgaaatgtccgttatataatctacaaaacaatcatcgcatatagtatgcgatagtagagtaaacatttttatcgtttctactgggttcatacatcgtctacccaattcggttatgaatgaaattgtcgccaatcttacacccaaacccttgttatccattagcatagtattaacttcgttatttatgtcataaactgtaaatgattctgtagatgccatatcatacatgatattcatgtccctattataatcattactaactttatcacaatatatgttgataatatctatatatgatctagtctttgtgggcaactgtctatacaagtcgtctaaacgttgtttactcatatagtatcgaacagccatcattacatggtcccgttccgttgatagataatcgagtatgttagtggacttgtcaaatctatataccatattttctggaagtggatatacatagtcgtgatcaacattattgctagcctcatcttctatatcctgtactataccattatctatatcatctacataatctacgatattattatacataaacatcgacaacatactattgtcaattatctaagtcctgttgatccaaacccttgatctcctctatctgtactatctagagattgtacttcttccagttctggataatatatacgttgatagattagctgggctattctatcccccgtatttacattaaacgtacattttccattattaataagaataactcctatgtttcccctataatcttcgtctattacaccgcctcctatatcaatgccttttagggacagaccagacctaggagctattctaccatagcagaacttaggcatggacatactaatatctgtcttaattaactgtcgttctccaggagggatagtataatcgtaagcgctatataaatcatatccggcggcgtaaggtgattgcctagtaggagatttagctctgttagtttccttaacaaatctaactggtgagttaatattcatgttgaacataaaactaatattttatttcaaaattatttaccatcccatatattccatgaataagtgtgatgattgtacacttctatagtatctatatacgattcacgataaaatcctcctatcaatagcagtttattatccactatgatcaattctggattatccctcggataaataggatcatctatcagagtccatgtattgctggattcacaataaaattccgcatttctaccaaccaagaataaccttctaccgaacactaacgcgcatgatttataatgaggataataagtggatggtccaaactgccactgatcatgattgggtagcaaatattctgtagttgtatcagtttcagaatgtcctcccattacgtatataacattgtttatagatgccactgctggattacatctaggtttcagaagactcggcatattaacccaagcagcatccccgtggaaccaacgctcaacagatgtgggatttggtagacctcctactacgtataatttattgttagcgggtatcccgctagcatacagtctggggctattcatcggaggaattggaatccaattgtttgatatataatttacagctatagcattgttatgtatttcattgttcatccatccaccgatgagatatactacttctccaacatgagtacttgtacacatatggaatatatctataatttgatccatgttcataggatactctatgaatggatacttgtatgatttgcgtggttgtttatcacaatgaaatattttggtacagtctagtatccattttacattatttatacctctgggagaaagataatttgacctgattacatttttgataaggagtagcagatttcctaatttatttcttcgctttatataccacttaatgacaaaatcaactacataatcctcatctggaacatttagttcatcgctttctagaataagtttcatagatagataatcaaaattgtctatgatgtcatcttccagttccaaaaagtgtttggcaataaagtttttagtatgacataagagattggatagtccgtattctatacccatcatgtaacactcgacacaatattcctttctaaaatctcgtaagataaagtttatacaagtgtagatgataaattctacagaggttaatatagaagcacgtaataaattgacgacgttatgactatctatatatacctttccagtatatgagtaaataactatagaagttaaactgtgaatgtcaaggtctagacaaacccttgtaactggatctttatttttcgtgtatttttgacgtaaatgtgtgcgaaagtaaggagataactttttcaatatcgtagaattgactattatattgccacctatagcatcaataattgttttgaatttcttagtcatagacaatgctaatatattcttacagtacacagtattaacaaatatcggcatttatgtttctttaaaagtcaacatctagagaaaaatgattatctttttgagacataactcccattttttggtattcacccacacgtttttcgaaaaaattagtttttccttccaatgatatattttccatgaaatcaaacggattggtaacattataaatttttttaaatcccaattcagaaatcaatctatccgcgacgaattctatatatgttttcatcatttcacaattcattcctataagtttaactggaagagccgcagtaagaaattcttgttcaatggatactgcatctgttataatagatctaacggtttcttcactcggtggatacaataaatgtttaaacatcaaacatgcgaagtcgcagtgtagaccctcgtctctactaattagttcgttggaaaacgtgagtccgggcattaggccacgctttttaagccaaaatatggaagcgaatgatccggaaaagaagattccttctactgcagcaaaggcaataagtctctctccataaccggcgctgtcatgtatccacttttgagcccaatcggccttcttttttacacaaggcattgtttctatggcattaaagagatagtttttttcattactatctttaacataagtatcgatcaaaagactatacatttccgaatgaatgttttcaatggccatctgaaatccgtagaaacatctagcctcggtaatctgtacttctgtacaaaatcgttccgccaaattttcattcactattccgtcactggctgcaaaaaacgccaatacatgttttataaaatatttttcgtctggtgttagtttattccaatcattgatatctttagatatatctacttcttccactgtccaaaatgatgcctctgcctttttatacatgttccagatgtcatgatattggattgggaaaataacaaatctatttggatttggtgcaaggatgggttccataactaaattaacaatatcaataaattttttttcagttatctatatgcctgtacttggattttttgtacatcgatatcgccgcaatcactacaataattacaagtattattgatagcattgttattagtactatcataattaaattatcgacattcatgggtgctgaataatcgttattatcatcattatcattttgtaattgtgacatcatactaaataaatcgtttgcgagattgttgtgggaagcgggcatggaggatgcattatcattattatttaacgccttccatttggattcacaaatatggcgcgcgttcaacattttatggaaactataattttgtgaaaacagataacaagaaaactcgtcatcgttcaaatttttaacgatagtaaaccgattaaacgtcgagctaatttctaacgctagcgactctgttggatatgggtttccagatatatatcttttcagttcccctacgtatctataatcatctgtaggaaatggaagatatttccatttatctactgttcctaatatcatatgtggtggtgtagtagaaccattaagcgcgaaagatgttatttcgcatcgtattttaacttcgcaataatttctggttagataacgcactctaccagtcaagtcaatgatattagcctttacagatatattcatagtagtcgtaacgatgactccatcttttagatgcgatactcctttgtatgtaccagaatcttcgtacctcaaactcgatatatttaaacaagttaatgagatattaacgcgttttatgaatgatgatatataaccagaagttttatcctcggtggctagcgctataaccttatcattataataccaactagtgtgattaatatgtgacacgtcagtgtgggtacaaatatgtacattatcgtctacgtcgtattcgatacatccgcatacagccaacaaatataaaatgacaaatactctaacgccgttcgtacccatcttgatgcggtttaataaatgttttgatttcaatttattgtaaaaaaagattcggttttatactgttcgatattctcattgcttatattctcatctatcatctccacacagtcaaatccgtggttagcatgcacctcatcaaccggtaaaagactatcggactcttctatcattataactctagaatatttaatttggtcattattaatcaagtcaattatcttatttttaacaaacgtgagtattttactcattttttataaaaacttttagaaatatacagactctatcgtgtgtctatatcttctttttatatccaatgtatttatgtctgatttttcttcatttatcatatataatggtccaaattctacacgtgcttcggattcatccagatcattaaggttcttataattgtaacatccttctcttccctcttctacatcttccttcttattcttattcttagcgtcacagaatctaccacagcaggatcccatgacgagcgtcatattaaactaatccattttcaattataatatatgattagtaatgaccattaaaataaaaaatattcttcataaccggcaagaaagtgaaaagttcacattgaaactatgtcagtagtatacatcatgaaatgatgatatatatatactctattttggtggaggattatatgatataattcgtggataatcattcttaagacacatttcttcattcgtaaatcttttcacgttaaatgagtgtccatattttgcaatttcttcatatgatggcggtgtacgtggacgaggctgctcctgttcttgttgtggtcgccgactgtcgtgtttgcgtttatccctccattatcgcgattgcgtagatggagtactattatataccttgtaattaaatttttttattaattaaacgtataaaaacgttccgtatctgtatttaagagccagatttcgtctaatagaacaaatagctacagtaaaaataactagaataattgctacacccactagaaaccacggatcgtaatacggcaatcggttttcgataataggtggaacgtatattttatttaaggacttaacaattgtctgtaaaccacaatttgcttccgcggatcctgtattaactatctgtaaaagcatatgttggccgggcggagccgaacattctccgatatccaatttctgtatatctataatattattaacctccgcatacgcattacagttcttttctagcttggataccgcactaggtacatcgtctagatctattcctatttcctcagcgatagctcttctatccttttccggaagcaatgaaatcacttcaataaatgattcaaccatgagtgtgaaactaagtcgagaattactcatgcatttgttagttattcggagcgcgcaatttttaaactgtcctataacctctcctatatgaatagcacaagtgacattagtagggatagaatgttgagctaatttttgtaaataactatctataaaaagattatacaaagttttaaactctttagtttccgccatttatccagtctgagaaaatgtctctcataataaatttttccaagaaactaattgggtgaagaatggaaacctttaatctatatttatcacagtctgttttggtacacatgatgaattcttctaatgccgtactaaattcgatatctttttcgatttctggatatgtttttaataaagtatgaacaaagaaatggaaatcgtaataccagttatgtttaactttgaaattgttttttattttcttgttaatgattccagccacttgggaaaagtcaaagtcgtttaatgccgatttaatacgttcattaaaaacaaactttttatcctttagatgaattattattggttcattggaatcaaaaagtaagatattatcgggtttaagatctgcgtgtaaaaagttgtcgcagcatggtagttcgtagattttaatgtataacagagccatctgtaaaaagataaactttatgtattgtaccaaagatttaaatcctaatttgatagctaactcggtatctactttatctgccgaatacagtgctaggggaaaaattataatgtttcctctttcgtattcgtagttagttctcttttcatgttcgaaaaagtgaaacatgcggttaaaatagtttataacattaatattactgttaataactgccgggtaaaagtgggatagtaatttcacgaatttgatactgtcctttctctcgttaaacgcctttagaaaaactttagaagaatatctcaatgatagttcctgaccatccatagtttgtatcaataatagcaacatatgaagaacacgtttatacagagtatgtaaaaatgttaatttatagtttaatcccatggcccacgcacacacgattaattttttttcatctccctttagattgttgtatagaaatttgggtactgtgaactccgccgtagtttccatgggactatataattttgtggcctcgaatacaaattttactacatagttatctatcttaaaaactataccatatcctcctgtagatatgtgataaaaatcgtcgtttataggataaaatcgtttatccttttgttggaaaaaggatgaattaatgtaatcattctcttctatctttagtagtgtttccttattaaaattcttaaaataatttaacaatctaactgacggagcccaattttggtgtaaatctaattgggacattatattgttaaaatacaaacagtctcctaatataacagtatctgataatctatggggagacatccattgatattcaggggatgaatcattggcaacacccatttattgtacaaaaagccccaatttacaaacgaaagtccaggtttgatagagacaaactattaactattttgtctctgtttttaacacctccacagtttttaatttctttagtaatgaaattattcacaatatcagtatcttctttatctaccagagattttactaacttgataaccttggctgtctcattcaatagggtagtaatatttgtatgtgtgatattgatatctttttgaattgtttcttttagaagtgattctttgatggtgccagcatacgaattacaataatgcagaaactcggttaacatgcaggaattatagtaagccaattccaattgttgcctgtgttgtattagagtgtcaatatgagcaatggtgtccttgcgtttctctgatagaatgcgagcagcgattttggcgttatcatttgacgatatttctggaatgacgaatcctgtttctactaactttttggtaggacaaagtgaaacaatcaagaagatagcttctcctcctatttgtggaagaaattgaactcctctagatgatctactgacgatagtatctccttgacagatattggaccgaattacagaagtacctggaatgtaaagccctgaaaccccctcattttttaagcagattgttgccgtaaatcctgcactgtgaccaagatagagagctcctttggtgaatccatctctatgtttcagtttaaccaagaaacagtcagctggtctaaaatttccatctctatctaatacagcatctaacttgatgtcaggaactatgaccggtttaatgttatatgtaacattgagtaaatccttaagttcataatcatcactgtcatcagttatgtacgatccaaacaatgtttctactggcatagtggatacgaagatgctatccatcagaatgtttccctgattagtattttctatatagctattcttctttaaacgattttccaaatcagtaactatgttcatttttttaggagtaggacgcctagccagtatggaagaggattttctagatcctctcttcaacatctttgatctcaatggaatgcaaaaccccatagtgaaacaaccaacgataaaaataatattgtttttcactttttataattttaccatctgactcatggattcattaatatctttataagagctactaacgtataattctttataactgaactgagatatatacaccggatctatggtttccataattgagtaaatgaatgctcggcaataactaatggcaaatgtataaaacaacgaaattatactagagttgttaaagttaatattttctatgagctgttccaataaattatttgttgtgactgcgttcaagtcataaatcatcttgatactatccagtaaacagtctttaagttctggaatattatcatcccattgtaaagcccctaattcgactatcgaatatcctgctctgatagcagtttcaatatcgacggacgtcaatactgtaataaaggtggtagtattgtcatcatcgtgataaactacgggaatatggtcgttagtaggtacggtgactttacacaacgcgatatataactttccttttgtaccatttttaacgtagttgggacgtcctgcagggtattgttttgaagaaatgatatcgagaacagatttgatacgatatttgttggattcctgattattcactataatataatctagacagatagatgattcgataaatagagaaggtatatcgttggtaggataatacatccccattccagtattctcggatactctattgatgacactagttaagaacatgtcttctattctagaaaacgaaaacatcctacatggactcattaaaacttctaacgctcctgattgtgtctcgaatgcctcgtacaaggatttcaaggatgccatagattctttgaccaacgatttagaattgcgtttagcatctgatttttttattaaatcgaatggtcggctctctggtttgctaccccaatgataacaatagtcttgtaaagataaaccgcaagaaaatttatacgcatccatccaaataaccctagcaccatcggatgatattaatgtattattatagattttccatccacaattattgggccagtatactgttagcaacggtatatcgaatagattactcatgtaacctactagaatgatagttcgtgtactagtcataatatctttaatccaatctaagaaatttaaaattagattttttacactgttaaagttaacaaaggtattacccggatacgtggatatcatatatggcattggtccattatcagtaatagctccataaactgatacggcgatggtttttatatgtgtttgatctaacgaggaagaaattcgcgcccacaattcatctctagatatgtatttaatatcaaacggtaacacatcaatttcgggacgcgtatatgtttctaaatttttaatccaaatataatgatgacctatatgccctattatcatactgtcaactatagtacacctagagaacttacgatacatctgtttcctataatcgttaaattttacaaatctataacatgctaaaccttttgacgacaaccattcattaatttctgatatggaatctgtattctcgataccgtattgttctaaagccagtgctatatctccctgttcgtgggaacgctttcgtataatatcgatcaacggataatctgaagtttttggagaataatatgactcatgatctatttcgtccataaacaatctagacataggaattggaggcgatgatcttaattttgtgcaatgagtcgtcaatcctataacttctaatattgtaatattcatcatcgacataacactatctatgttatcatcgtatattagtataccacggccttcttcatttcgtgccaaaataatatacagtcttaaataattacgcaatatctcaatagtttcataattgttagctgttttcatcaaggtttgtatcctgtttaacatgatggcgttctataacgtctctattttctatttttaattttttaaatttttaacgatttactgtggctagatacccaatctctctcaaatatttttttagcctcgcttacaagctgtttatctatactattaaaactgacgaatccgtgattttggtaatgggttccgtcgaaatttgccgaagtgatatgaacatattcgtcgtcgactatcaacaattttgtattattctgaatagtgaaaaccttcacagatagatcattttgaacacacaacgcgtctagacttctggcggttgccatagaatatacgtcgttcttatcccaattaccaactagaagtctgatcttaactcctctattaatggctgcttctataatggagttgtaaatgtcaggccaatagtagctattaccgtcgacacgtgtagtgggaactatggccaaatgttcaatatctatactagtcttagccgacttgagtttatcaataactacatcagtgtctagatctctagaatatcccaataggtgttctggagaatcagtaaagaacactccacctataggattcttaatatgatacgcagtgctaactggcagacaacaagccgcagagcataaattcaaccatgaattttttgcgctattaaaggctttaaaagtatcaaatcttctacgaagatctgtggccagcgggggataatcagaatatacacctaacgttttaatcgtatgtatagatcctccagtaaatgacgcgtttcctacataacatctttcatcatctgacacccaaaaacaaccgagtagtagtcccacattattttttttatctatattaacggttataaaatttatatccgggcagtgactttgtagctctcccagatttcttttccctcgttcatctagcaaaactattattttaatccctttttcagatgcctcttttagtttatcaaaaataagcgcgcccctagtcgtactcagaggattacaacaaaaagatgctatgtatatatatttcttagctagagtgataatttcgttaaaacattcaaatgttgttaaatgatcggatctaaaatccatattttctggtagtgtttctaccagcctacattttgctcccgcaggtaccggtgcaaatggccacatttagttaacataaaaacttatacatcctgttctatcaacgattctagaatatcatcggctatatcgctaaaattttcatcaaagtcgacatcacaacctaactcagtcaatatattaagaagttccatgatgtcatcttcgtttatttctatatccgtatccattgtagattgttgaccgattatcgagtttaaatcattactaatactcaatccttcagaatacaatctgtgtttcattgtaaatttataggcggtgtatttaagttggtagattttcaattatgtatcaatatagcaacagtagttcttgctcctccttgattctagcatcctcttcattattttcttctacgtacataagcatgtccaatacgttagacaacacaccgacgatggcggccgccacagacacgaatatgactagaccgatgaccatttaaaaacccctctctagctttcacttaaactgtatcgattattcttttagaacatgtataatataaaaacattattctatttcgaatttaggcttccaaaaatttttcatccgtaaaccgataataatatatatagacttgttaatagtcggaataaatagattaatgcttaaactatcatcatctccacgattagagatacaatatttacattctttttgctgtttcgaaactttatcaatacacgttaatacaaacccaggaaggagatattgaaactgaggctgttgaaaatgaaacggtgaatacaataattcagataatgtaaaatcatgattccgtattctgatgatattagaactgctaatggatgtcgatggtatgtatctaggagtatctattttaacaaagcatcgatttgctaatatacaattatcattttgattaattgttattttattcatattcttaaaaggtttcatatttatcaattcttctacattaaaaatttccatttttaatttatgtagccccgcaatactcctcattacgtttcattttttgtctataatatccattttgttcatctcggtacatagattatccaattgagaagcgcatttagtagttttgtacattttaagtttattgacgaatcgtcgaaaactagttatagttaacattttattatttgataccctgatattaatacccctgccgttactattatttataactgatgtaacccacgtaacattagaattaattatcgatagtaatgcatcgacgcttccaaaattgtctattataaactcaccgataatttttttattgcatgttttcatattcattaggattatcaaatctttaatcttattacgattgtatgcgttgatattacaagacgtcattctaaaagacggaggatctccatcaaatgccagacaatcacgtacaaagtacatggaaataggttttgttctattgcgcatcatagattcatatagaacacccatagaaatactaatttgttttactctataaaatactaatgcatctatttcatcgttttgtataacgtctttccaagtgccaaattccaaatttttttcattgatagtaccaaattcttctatctctttaactacttgcatagataggtaattacagtgatgcctacatgccgttttttgaaactgaatagatgcgtctagaagcgatgctacactagtcacaatcaccactttcatatttagaatatatgtatgtaaaaatatagtagaatttcattttgtttttttctatgctataaatgaattctcattttgcatctgctcatactccgttttatatcaataccaaagaaggaagatatctggttctaaaagccgttaaagtatgcgatgttagaactgtagaatgcgaaggaagtaaagcttcctgcgtactcaaagtagataaaccctcatcgcccgcgtgtgagagaagaccttcgtccccgtccagatgcgagagaatgaataaccctggaaaacaagtcccgtttatgaggacggacatgctacaaaatatgttcgcggctaatcgcgataatgtagcttctagacttttgtcctaaaatactattatatccttttcgatattaataaatccgtgtcgtccaggttttttatctctttcagtatgtgaatagataggtattttatctctattcatcatcgaatttaagagatccgataaacattgtttgtattctccagatgtcagcatctgatacaacaatatatgtgcacataaacctctggcacttatttcatgtaccttccccttatcactaaggagaatagtatttgagaaatatgtatacatgatattatcatgaattagatatacagaatttgtaacactctcgaaatcacacgatgtgtcggcgttaagatctaatatatcactcgataacacattttcatctagatacactagacattttttaaagctaaaatagtctttagtagtgacagtaactatgcgattattttcatcgatgatacatttcatcggcatattattacgcttaccatcaaagactataccatgtgtatatctaacgtattctagcatggttgccatacgtgcattaaacttttcaggatctttggatagatcttccaatctatctatttgagaaaacatttttatcatgttcaatagttgaaacgtcggatccactatatagatattatctataaagattttaggaactacgttcatggtatcctggcgaatattaaaactatcaatgatatgattatcgttttcatcttttatcaccatatagtttctaagatatgggattttacttaatataatattatttcccgtgataaattttattagaaaggccaaatctataagaaaagtcctagaattagtctgaagaatatctatatcgccgtaccgtatatttggattaattagatatagagaatatgatccgtaacatatacaacttttattatggcgtctaagatattcttccatcaacttattaacatttttgactagggaagatacattatgacgtcccattacttttgccttgtctattactgcgacgttcatagaatttagcatatctcttgccaattcttccattgatgttacattataagaaattttagatgaaattacatttggagctttaatagtaagaactcctaatatgtccgtgtatgtggtcactaatacagattgtagttctataatcgtaaataatttacctatattatatgtttgagtctgtttagaaaagtagctaagtatacgatcttttatttctgatgcagatgtatcaacatcggaaaaaaatctttttttattcttttttactaaagatacaaatatgtctttgttaaaaacagttattttctgaatatttctagcttgtaattttaacatatgatattcgttcacactaggtactctgcctaaataggtttctataatctttaatgtaatattaggaagagtattctgatcaggattcctattcattttgaggatttaaaactctgattattgtctaatatggtctcaacacaaactttttcacagagcgatagagtttttgataactcgtttttcttaagaaatataaaactactgtttccagagctcgctctatcttttattttatctaattcgatacaaactcctgatactggttcagaaagtaattcattaattttcagtcctttatagaagatatttaatatagataatacaaaattttcagttcttgatatcgatctgattgatcctagaactagatatattaataacgtgctcattaggcagtttatggcagcttgataattagatatagtatattccagttcatatttattagataccgcattgcccagattttgatattctatgaattcctctgaaaataaatccaaaataactagacattctattttttgtggattagtgtactctcttccctctatcatgttcactactggtgtccacgatgataaatatctagagggaatataatatagtccataggatgccaatctagcaatgtcgaataactgtaatttgattcttcgttcttcattatgaattgattcttgaggtataaacctaacacaaattatattattagacttttcgtatgtaatgtctttcatgttataagtttttaatcctggaatagaatctattttaatgaggcttttaaacgcagagttctccaacgagtcaaagcataatactctgttgtttttcttatatacgatgttacgattttcttctttgaatggaataggtttttgaattagtttataattacaacataatagataaggaagtgtgcaaatagtacgcggaaaaaacataatagctcccctgttttcatccatggttttaagtaaatgatcactggcttctttagtcaatggatattcgaacattaaccgtttcatcatcattggacagaatccatatttcttaatgtaaagagtgatcaaatcattgtgtttattgtaccatcttgttgtaaatgtgtattcggttatcggatctgctcctttttctattaaagtatcgatgtcgatctcgtctaagaattcaactatatcgacatatttcatttgtatacacataaccattactaacgtagaatgtataggaagagatgtaacgggaacagggtttgttgattcgcaaactattctaatacataattcttctgttaatacgtcttgcacgtaatctattatagatgccaagatatctatataattattttgtaagatgatgttaactatgtgatctatataagtagtgtaataattcatgtatttcgatatatgttccaactctgtctttgtgatgtctagtttcgtaatatctatagcatcctcaaaaaatatattcgcatatattcccaagtcttcagttctatcttctaaaaaatcttcaacgtatggaatataataatctattttacctcttctgatatcattaatgatatagtttttgacactatcttctgtcaattgattcttattcactatatctaagaaacggatagcgtccctaggacgaactactgccattaatatctctattatagcttctggacataattcatctattataccagaattaatgggaactattccgtatctatctaacatagttttaagaaagtcagaatctaagacctgatgttcatatattggttcatacatgaaatgatctctattgatgatagtgactatttcattctctgaaaattggtaactcattctatatatgctttccttgttgatgaaggatagaatatactcaatagaatttgtaccaacaaactgttctcttatgaatcgtatatcatcatctgaaataatcatgtaaggcatacatttaacaattagagacttgtctcctgttatcaatatactattcttgtgataatttatgtgtgaggcaaatttgtccacgttctttaattttgttatagtagatatcaaatccaatggagctacagttcttggcttaaacagatatagtttttctggaacgaattctacaacattattataaaggactttgggtagataagtgggatgaaatcctattttaattaatgcgatagccttgtcctcgtgcagatatccaaacgcttttgtgatagtatggcattcattgtctagaaacgctctacgaatatctgtgacagatatcatctttagagaatatactagtcgcgttaatagtactacaatttgtattttttaatctatctcaataaaaaaattaatatgtatgattcaatgtataactaaactactaactgttattgataactagaatcagaatctaatgatgacgtaaccaagaagtttatctactgccaatttagctgcattatttttagcatctcgtttagattttccatctgccttatcgaatactcttccgtcgatgtctacacaggcataaaatgtaggagagttactaggccccactgattcaatacgaaaagaccaatctctcctagtaatttggcagtactcattaataacggtgacagggttagcacctttccaatcaataatttttttagccggaataacatcatcaaaagacttatgatcctctctcattgatttttcgcgggatacatcatctattatggcgtcagccataacatcagcatccggcttatccgcctccgttgtcataaaccaacgaggaggaatatcgtcggagctgtacaccatagcactacgttgaagatcgtacagagctttattaacttctcgcttctccatattaagttgtctagttagttgtgcagcagtagctccttcgattccaatggttttaatagcctcacacacaatctctgcgttagaacgttcgtcgatatagattttagacatttttagagagaactaacacaaccagcaataaaactgaacctactttatcatttttttattcatcatcctctggtggttcgtcgttcctatcgaatgtggatctgattaacccgtcatctataggtgatgctggttctggagattctggaggagatggattattatctggaagaatctctgttatttccttgttttcatgtatcgattgcgttgtaacattaagattgcgaaatgctctaaatttgggaggcttaaagtgttgtttgcaatctctacacgcatgtctaactagtggaggttcgtcagcggctctagtttgaatcatcatcggcgtagtattcctacttttacagttaggacacggtgtattgtatttctcgtcgagaacgttaaaataatcgttgtaactcacatcctttattttatctatattgtattctactcctttcttaatgcattttataccgaataagagatagcgaaggaattctttttcggtgccgctagtacccttaatcatatcacatagtgttttatattccaaatttgtggcaatagacggtttatttctatacgatagtttgtttctggaatcctttgagtattctataccaatattattctttgattcgaatttagtttcttcgatattagattttgtattacctatattcttgatgtagtactttgatgatttttccatggcccattctattaagtcttccaagttggcatcatccacatattgtgatagtaattctcggatatcagtagcggctaccgccattgatgtttgttcattggatgagtaactactaatgtatacattttccatttataacacttatgtattaactttgttcatttatattttttcattattatgttgatattaacaaaagtgaatatatatgttaataattgtattgtggttatacggctacaatttcataatgagtggaagtcagtgtccgatgatcaatgacgatagctttactctgaaaagaaagtatcaaatcgatagtgcggagtcaacaataaaaatggataagaagaggataaagtttcagaatagagccaaaatggtaaaagaaataaatcagacaataagagcagcacaaactcattacgagacattgaaactaggatacataaaatttaagagaatgattaggactactactctagaagatatagcaccatctattccaaataatcagaaaacttataaactattctcggacatttcagccatcggcaaagcatcacagaatccgagtaagatggtatatgctctgctgctttacatgtttcccaatttgtttggagatgaccatagattcattcgttatagaatgcatccaatgagtaaaatcaaacacaagatcttctctcctttcaaacttaatcttattagaatattagtggaagaaagattctataataatgaatgcagatctaataaatggagaataattggaacacaagttgataaaatgttgatagctgaatctgataaatatacaatagatgcaaggtataacctaaaacccatgtatagaatcaagggaaaatctgaagaagataccctcttcatcaaacagatggtagaacaatgtgtgacatcccaggaattggtggaaaaagtgttgaagatactgtttagagatttgttcaagagtggagaatacaaagcatacagatacgatgatgatgtagaaaatggatttattggattggatacactaaaattaaacattgttcatgatatagttgaaccatgtatgcctgttcgtaggccagtggctaagatactgtgtaaagaaatggtaaataaatactttgagaatccgctacatattattggtaaaaatcttcaagagtgcattgactttgttagtgaataggcatttcatctttctccaatactaattcaaattgttaaattaataatggatagtataaatagttattagtgataaaatagtaaaaataattattagaataagagtgtagtatcatagataactctcttctataaaaatggattttattcgtagaaagtatcttatatacacagtagaaaataatatagattttttaaaggatgatacattaagtaaagtaaacaattttaccctcaatcatgtactagctctcaagtatctagttagcaattttcctcaacacgttattactaaggatgtattagctaataccaatttttttgttttcatacatatggtacgatgttgtaaagtgtacgaagcggttttacgacacgcatttgatgcacccacgttgtacgttaaagcattgactaagaattatttatcgtttagtaacgcaatacaatcgtacaaggaaaccgtgcataaactaacacaagatgaaaaatttttagaggttgccgaatacatggacgaattaggagaacttataggcgtaaattatgacttagttcttaatccattatttcacggaggggaacccatcaaagatatggaaatcatttttttaaaactgtttaagaaaacagacttcaaagttgttaaaaaattaagtgttataagattacttatttgggcatacctaagcaagaaagatacaggcatagagtttgcggataatgatagacaagatatatatactctatttcaacaaactggtagaatcgtccatagcaatctaacagaaacgtttagagattatatctttcccggagataagactagctattgggtgtggttaaacgaaagtatagctaatgatgcggatatcgttcttaatagacacgccattaccatgtatgataaaattcttagttatatatactctgagataaaacaaggacgcgttaataaaaacatgcttaagttagtttatatctttgagcctgaaaaagatatcagagaacttctgctagaaatcatatatgatattcctggagatatcctatctattattgatgcaaaaaacgacgattggaaaaaatattttattagtttttataaagctaattttattaacggtaatacatttattagtgatagaacgtttaacgaggacttattcagagttgttgttcaaatagatcccgaatatttcgataatgaacgaattatgtctttattctctacgagtgctgcggacattaaacgatttgatgagttagatattaataacagttatatatctaatataatttatgaggtgaacgatatcacattagatacaatggatgatatgaagaagtgtcaaatctttaacgaggatacgtcgtattatgttaaggaatacaatacatacctgtttttgcacgagtcggatcccatggtcatagagaacggaatactaaagaaactgtcatctataaaatccaagagtagacggctgaacttgtttagcaaaaacattttaaaatattatttagacggacaattggctcgtctaggtcttgtgttagatgattataaaggagacttgttagttaaaatgataaaccatcttaagtctgtggaggatgtatccgcattcgttcgattttctacagataaaaaccctagtattcttccatcgctaatcaaaactattttagctagttataatatttccatcatcgtcttatttcaaaggtttttgagagataatctatatcatgtagaagaattcttggataaaagcatccatctaaccaagacggataagaaatatatacttcaattgataagacacggtagatcatagaacagaccaaatatattattaataatttgtatatacatagatataattatcacatattaaaaattcacacatttttgataaatgggaactgctgcaacaattcagactcccaccaaattaatgaataaagaaaatgcagaaatgattttggaaaaaattgttgatcatatagttatgtatattagtgacgaatcaagtgattcagaaaataatcctgaatatattgattttcgtaacagatacgaagactatagatctctcattataaaaagtgatcacgagtttgtaaagctatgtaaaaatcatgcagagaaaagttctccagaaacgcaacaaatgattatcaaacacatatacgaacaatatcttattccagtatctgaagtactattaaaacctataatgtccatgggtgacataattacatataacggatgtaaagacaatgaatggatgctagaacaactctctaccctaaactttaacaatctccgcacatggaactcatgtagcataggcaatgtaacgcgtctgttttatacattttttagttatctgatgaaagataaactaaatatataagtataatcccattctaatactttaacctgatgtattacctgcatcttattagaatattaacctaactaaaagacataacataaaaactcattacatagttgataaaaagcggtaggatataaatattatggctgccaccgttccgcgttttgacgacgtgtacaaaaatgcacaaagaagaattctagatcaagaaacattttttagtagaggtctaagtagaccgttaatgaaaaacacatatctatttgataattacgcgtatggatggataccagaaactgcaatttggagtagtagatacgcaaacttagatgcaagtgactattatcccatttcgttgggattacttaaaaagttcgagtttctcatgtctctatataaaggtcctattccagtatacgaagaaaaagtaaatactgaattcatagccaatggatcgttctctggtagatacgtatcatatcttcgaaagttttctgctcttccaacaaacgagtttattagttttttgttactgacttccattccaatctataatatcttgttctggtttaaaaatactcagtttgatattactaaacacacattattcagatacgtctatacagataatgccaaacacctggcgttggctaggtatatgcatcaaacaggagactataagcctttgtttagtcgtctcaaagagaattatatatttaccggtcccgttccaataggtatcaaagatatagatcaccctaatcttagtagagcaagaagtccatccgattatgagacattagctaatattagtactatattgtactttaccaagtatgatccggtattaatgtttttattgttttacgtacctgggtattcaattactacaaaaattactccagccgtagaatatctaatggataaactgaatctaacaaagagcgacgtacaactgttgtaaattattttatgcttcgtaaaatgtaggttttgaaccaaacattctttcaaagaatgagatgcataaaactttattatccaatagattgactatttcggacgtcaatcgtttaaagtaaacttcgtaaaatattctttgatcactgccgagtttaaaacttctatcgataattgtctcatatgttttaatatttacaagttttttggtccatggtacattagccggacaaatatatgcaaaataatatcgttctccaagttctatagtttctggattatttttattatattcagtaaccaaatacatattagggttatctgcggatttataatttgagtgatgcattcgactcaacataaataattctagaggagacgatctactatcaaattcggatcgtaaatctgtttctaaagaacggagaatatctatacatacctgattagaattcatccgtccttcagacaacatctcagacagtctggttttgtacatcttaatcatattcttatgaaacttggaaacatctcttctagtttcactagtacctttattaattctctcaggtacagattttgaattcgacgatgccgagtatttcatcgttgtatatttcttcttcgattgcataatcagattcttatataccgcctcaaactctattttaaaattattaaacaatactctactattaatcagtcgttctaactctttcgctatttctatagacttatctacatcttgactgtctatctctgtaaacacggagtcggtatctccatacacgctacgaaaacgaaatctgtaatctataggcaacgatgttttcacaatcggattaatatctctatcgtccatataaaatggattacttaatggattggcaaaccgtaacataccgttagataactctgctccatttagtaccgattctagatacaagatcattctacgtcctatggatgtgcaactcttagccgaagcgtatgagtatagagcactatttctaaatcccatcagaccatatactgagttggctactatcttgtacgtatattgcatggaatcataaatggccttttcagttgaactggtagcctgttttaacatctttttatatctggctctctctgccaaaaatgttcttaatagtctaggaatggttccttctatcgatctatcgaaaattgctatttcagagatgaggttcggtagtctaggttcacaatgaaccgtaatatatctaggaggtggatatttctgaagcaatagctgattatttatttcttcttccaatctattggtactaacaacgacaccgactaatgtttccggagatagatttccaaagatacacacattaggatacagactgttataatcaaagattaatacattattactaaacattttttgttttggagcaaataccttaccgccttcataaggaaacttttgttttgtttctgatctaactaagatagttttagtttccaacaatagctttaacagtggacccttgatgactgtactcgctctatattcgaataccatggattgaggaagcacatatgttgacgcacccgcgtctgtttttgtttctactccataatactcccacaaatactgacacaaacaagcatcatgaatacagtatctagccatatctaaagctatgtttagattataatccttatacatctgagctaaatcaacgtcatcctttccgaaagataatttatatgtatcattaggtaaagtaggacataatagtacgactttaaatccattttcccaaatatctttacgaattactttacatataatatcctcatcaacagtcacataattacctgtggttaaaacctttgcaaatgcagcggctttgcctttcgcgtccgtagtatcgtcaccgatgaacgtcatttctctaactcctctatttaatactttacccatgcaactgaacgcgttcttggatatagaatccaatttgtacgaatccaatttttcagatttttgaatgaatgaatatagatcgaaaaatatagttccattattgttattaacgtgaaacgtagtattggccatgccgcctactcccttatgactagactgatttctctcataaatacagagatgtacagcttcctttttgtccggagatctaaagataatcttctctcctgttaataactctagacgattagtaatatatctcagatcaaagttatgtccgttaaaggtaacgacgtagtcgaacgttagttccaacaattgtttagctattcgtaacaaaactatttcagaacatagaactagttctcgttcgtaatccatttccattagtgactgtatcctcaaacatcctctatcgacggcttcttgtatttcctgttccgttaacatctcttcattaatgagcgtaaacaataatcgtttaccacttaaatcgatataacagtaacttgtatgcgagattgggttaataaatacagaaggaaacttcttatcgaagtgacactctatatctagaaataagtacgatcttgggatatcgaatctaggtatttttttagcgaaacagttacgtggatcgtcacaatgataacatccattgttaatctttgtcaaatattgctcgtccaacgagtaacatccgtctggagatatcccgttagaaatataaaaccaactaatattgagaaattcatccatggtggcattttgtatgctgcgtttctttggctcttctatcaaccacatatctgcgacggagcattttctatctttaatatctagattataacttattgtctcgtcaatgtctatagttctcatctttcccaacggcctcgcattaaatggaggaggagacaatgactgatatatttcgtccgtcactacgtaataaaagtaatgaggaaatcgtataaatacggtctcaccatttcgacatctggatttcagatataaaaatctgttttcaccgtgactttcaaaccaattaatgcaccgaacatccatttatagaatttagaaatatattttcatttaaatgaatcccaaacattggggaagagccgtatggaccattatttttatagtactttcgcaagcgggtttagacggcaacatagaagcgtgtaaacgaaaactatatactatagtcagcactcttccatgtcctgcatgtagacggcacgcgactatcgctatagaggacaataatgtcatgtctagcgatgatctgaattatatttattattttttcatcagattatttaacaatttggcatctgatcccaaatacgcgatcgatgtgacaaaggttaaccctttataaacttaacccattataaaacttatgattagtcacaactgaaataaccgcgtgattattttttggtataattctacacggcatggtttctgtaactatgaattcaacccccgttacattagtgaaatctttaacaaacagcaagggttcgtcaaagacataaaactcattgtttacaatcgaaatagaccccctatcacacttaaaataaaaaatatccttatcctttaccaccaaataaaattctgattggtcaatgtgaatgtattcacttaacagttccacaaatttatttattaactccgaggcacatacatcgtcggtattttttatggcaaactttactcttccagcatccgtttctaaaaaaatattaacgagttccatttatatcatccaatattattgaaatgacgttgatggacagatgatacaaataagaaggtacggtacctttgtccaccatctcctccaattcatgctctattttgtcattaactttaatgtatgaaaacagtacgccacatgcttccatgacagtgtgtaacactttggatacaaaatgtttgacattagtataattgttcaagactgtcaatctataatagatagtagctataatatattctatgatggtattgaagaagatgacaaccttggcatattgatcatttaacacagacatggtatcaacagatagcttgaatgaaagagaatcagtaattggaataagcgtcttctcgatagagtgtccgtataccaacatgtctgatattttgatgtattccattaaattatttagttttttctttttattttcgttaaacagcatttctgtcaacggaccccaacatcgttgaccgattaagttttgattgatttttccgtgtaatgcgtatctagtcagatcgtatagcctatccaataatccatcatctgtgcgtagatcacatcgtacactttttaattctctatagaagagcgacagacatctggagcaattacagacagcaatttctttattctctacagatgtaagatacttgaagacattcctatgatgatgcagaattttggataacacggtattgatggtatctgttaccataattcctttgatggctgatagtgtcagagcacaagatttccaatctttgacaatttttagcaccattatctttgttttgatatctatatcagacagcatggtgcgtctgacaacacagggattaagacggaaagatgaaatgattctctcaacatcttcaatggataccttgctattttttctggcattatctatatgtgcgagaatatcctctagagaatcagtatcctttttgatgatagtggatctcaatgacatgggacgtctaaaccttcttattttatcaccagattgcatggtgatttgtcttctttcttttatcataatgtaatctctaaattcatcggcaaattgtctatatctaaaatcataatatgagatgtttacctctacaaatatctgttcgtccaatgttagagtatctacatcagttttgtattccaaattaaacatggcaacggatttaattttatattcctctattaagtcctcgtcgataataacagaatgtagataatcatttaatccatcgtacatggttggaagatgcttgttgacaaaatctttaattgtcttgatgaaggtgggactatatctaacatcttgattaataaaatttataacattgtccataggatactttgtaactagttttatacacatctcttcatcggtaagtttagacagaatatcgtgaacaggtggtatattatattcatcagatatacgaagaacaatgtccaaatctatattgtttaatatattatatagatgtagcgtagctcctacaggaatatctttaactaagtcaatgatttcatcaaccgttagatctattttaaagttaatcatataggcattgatttttaaaaggtatgtagccttgactacattctcattaattaaccattccaagtcactgtgtgtaagaagattatattctatcataagcttgactacatttggtcccgataccattaaagaattcttatgatataaggaaacagcttttaggtactcatctactctacaagaattttggagagccttaacgatatcagtgacgtttattatttcaggaggaaaaaacctaacattgagaatgtcggagttaatagcttccagatacagtgattttggcaatagtccgtgtaatccataatccagtaacacgagctggtgcttgctagacaccttttcaatgtttaatttttttgaaataagctttgataaagccttcctcgcaaattccggatacatgaacatgtcggcgacatgattaagtattgttttttcattatttttatattttctcaacaagttctcaataccccaatagatgatagaatatcacccaatgcgtccatgttgtctatttccaacaggtcgctatatccaccaatagaagtttttccaaaaaagattctaggaacagttctaccaccagtaatttgttcaaaatagtcacgcaattcattttcgggtttaaattctttaatatcgacaatttcatacgctcctcttttgaaactaaacttatttagaatatccagtgcatttctacaaaaaggacatgtatacttgacaaaaattgtcactttgttattggccaacctttgttgtacaaattcctcggccattttaatatttaagtgatataaaactatctcgacttatttaactctttagtcgagatatatggacgcagatagctatatgatagccaactacagaaggcaaacgctataaaaaacataattacgacgagcatatttataaatatttttattcagcattacttgatatagtaatattaggcacagtcaaacattcaaccactctcgatacattaactctctcattttctttaacaaattctgcaatatcttcgtaaaaagattcttgaaactttttagaatatctatcgactctagatgaaatagcgttcgtcaacatactatgttttgtatacataaaggcgcccattttaacagtttctagtgacaaaatgctagcgatcctaggatcctttagaatcacatagattgacgattcgtctctcttagtaactctagtaaaataatcatacaatctagtacgcgaaataatattatccttgacttgaggagatctaaacaatctagttttgagaacatcgataagttcatcgggaatgacatacatactatctttaatagaactcttttcatccagttgaatggattcgtccttaaccaactgattaatgagatcttctattttatcattttccagatgatatgtatgtccattaaagttaaattgtgtagcgcttctttttagtctagcagccaatactttaacatcactaatatcgatatacaaaggagatgatttatctatggtattaagaattcgtttttcgacatctgtcaaaaccaattcctttttgcctgtatcatccagttttccatcctttgtaaagaaattattttctactagactattaataagactgataaggattcctccataattgcacaatccaaactttttaacaaaactagactttacaagatctacaggaatgcgtacttcaggtttcttagcttgtgattttttcttttgtggacattttcttgtgaccaactcatctaccatttcattgattttagcagtgaaataagctttcaatgcacgggcactgatactattgaaaacgagttgatcttcaaattccgccatttaagttcaccaaacaacttttaaatacaaatatatcaatagtagtagaataagaactataaaaaaaataataattaaccaataccaaccccaacaaccggtattattagttgatgtgactgttttctcatcacttagaacagatttaacaatttctataaagtctgtcaaatcatcttccggagaccccataaatacaccaaatatagcggcgtacaacttatccatttatacattgaatattggcttttctttatcgctatcttcatcatattcatcatcaatatcaacaagtcccagattacgagccagatcttcttctacattttcagtcattgatacacgttcactatctccagagagtccgataacgttagccaccacttctctatcaatgattagtttcttgagtgcgaatgtaatttttgtttccgttccggatctatagaaaactacaggtgtgataattgccttggccaattgtctttctcttttactgagtgattctagttcaccttctatagatctgagaatggatgattctccagtcgaaacatattctaccatggatccgtttaatttgttgatgaagatggattcatccttaaatgttttctctgtaatagtttccaccgaaagactatgcaaagaatttggaatgcgttccttgtgcttaatgtttccatagacggcttctagaagttgatacaacataggactagccgcggtaacttttatttttagaaagtatccatcgcttctatcttgtttagatttatttttataaagtttagtctctccttccaacataataaaagtggaagtcatttgactagataaactatcagtaagttttatagagatagacgaacaattagcgtattgagaagcatttagtgtaacgtattcgatacattttgcattagatttactaatcgattttgcatactctataacacccgcacaagtctgtagagaatcgctagatgcagtaggtcttggtgaagtttcaactctcttcttgattaccttactcatgattaaacctaaataattgtactttgtaatataatgatatatattttcactttatctcatttgagaataaaaatgtttttgtttaaccactgcatgatgtacagatttcggaatcgcaaaccaccagtggttttattttatccttgtccaatgtgaattgaatgggagcggatgcgggtttcgtacgtagatagtacattcccgtttttagaccgagactccatccgtaaaaatgcatactcgttagtttggaataactcggatctgctatatggatattcatagattgactttgatcgatgaaggctcccctgtctgcagccatttttatgatcgtcttttgtggaatttcccaaatagttttataaactcgcttaatatcttctggaaggtttgtattctgaatggatccaccatctgccataatcctattcttgatctcatcattccataattttctctcggttaaaactctaaggagatgcggattaactacttgaaattctccagacaatactctccgagtgtaaatattactggtatacggttccaccgactcattatttcccaaaatttgagcagttgatgcagtcggcataggtgccaccaataaactatttctaagaccgtatgttctgattttatcttttagaggttcccaattccaaagatccgacggtacaacattccaaagatcatattgtagaataccgttactggcgtacgatcctacatatgtatcgtatggtccttccttctcagctagttcacaactcgcctctaatgcaccgtaataaatggtttcgaagatcttcttatttagatcttgtgcttccaggctatcaaatggataatttaagagaataaacgcgtccgctaatccttgaacaccaataccgataggtctatgtctcttattagagatttcagcttctggaataggataataattaatatctataattttattgagatttctgacaattactttgaccacatccttcagtttgagaaaatcaaatcgcccatctattacaaacatgttcaaggcaacagatgccagattacaaacggctacctcattagcatccgcatattgtattatctcagtgcaaagattactacacttgatagttcctaaattttgttgattactctttttgttacacgcatccttataaagaatgaatggagtaccagtttcaatctgagattctataatcgctttccagacgactcgagcctttattatagatttgtatctcctttctctttcgtatagtgtatacaatcgttcgaactcgtctccccaaacattgtccaatccaggacattcatccggacacatcaacgaccactctccgtcatccttcactcgtttcataaagagatcaggaatccaaagagctataaatagatctctggttctatgttcctcgtttcctgtattctttttaagatcgaggaacgccataatatcagaatgccacggttccaagtatatggccataactccaggccgtttgtttcctccctgatctatgtatctagcggtgttattataaactctcaacattggaataataccgtttgatataccattggtaccggagatatagcttccactggcacgaatattactaattgatagacctattccccctgccattttagagattaatgcgcatcgttttaacgtgtcatagataccctctatgctatcatcgatcatgttaagtagaaaacagctagacatttggtgacgactagttcccgcattaaataaggtaggagaagcgtgcgtaaaccatttttcagaaagtagattgtacgtctcaatagctgagtctatatcccattgatgaattcctactgcgacacgcattaacatgtgctgaggtctttcaacgatcttgttgtttattttcaacaagtaggatttttccaaagttttaaaaccaaaatagttgtatgaaaagtctcgttcgtaaataataaccgagttgagtttatccttatatttgttaactatatccatggtgatacttgaaataatcggagaatgtttcccatttttaggattaacatagttgaataaatcctccatcacttcactaaatagtttttttgtttccttgtgtagatttgatacggctattctggcggctagaatggcataatccggatgttgtgtagtacaagtggctgctatttcggctgccagagtgtccaattctaccgttgttactccattatatattccttgaataaccttcatagctattttaataggatctatatgatccgtgtttaagccataacataattttctaatacgagacgtgattttatcaaacatgacattttccttgtatccatttcgtttaatgacaaacatttttgttggtgtaataaaaaaattatttaacttttcattaatagggatttgacgtatgtagcgtacaaaattatcgttcctggtatatagataaagagtcctatatatttgaaaatcgttacggctcgattaaactttaatgattgcatagtgaatatatcattaggatttaactccttgactatcagggcggcaccagaaattaccatcaaaagcattaatacagttatgccgatcgcagttagaacggttatagcatccaccatttatatctaaaaattagatcaaagaatatgtgacaaagtcctagttgtatactgagaattgacgaaacaatgtttcttacatatttttttcttattagtaactgacttaatagtaggaactggaaagctagacttgattattctataagtatagatacccttccaaataatattctctttgataaaagttccagaaaatgtagaattttttaaaaagttatcttttgctattaccaagattgtgtttagacgcttattattaatatgagtgatgaaatccacaccgcctctagatatcgcttttatttccacattagatggtaaatccaatagtgaaactatctttttaggaatgtatggactcgcgtttagaggagtgaacgtcttaggcgtcggaaaggatgattcatcaaacgaataaacaatttcacaaatggatgttaatgtattagtaggaaattttttgacgctagtggaattgaagattctaatggatgatgttctacctatttcatccgataacatgttaatttccgacaccaacggttttaatatttcgatgatatacggtagtctctctttcggacttatatagcttattccacaatacgagtcattatatactccaaaaaacaaaataactagtataaaatctgtatcgaatgggaaaaacgaaattatcgacataggtatagaatctggaacattgaacgtattaatacttaattctttttctgtggtaagtaccgataggttattgacattgtatggttttaaatattctataacttgagacttgatagatattagtgatgaattgaaaattatttttatcaccacgtgtgtttcaggatcatcgtcgacgcccgtcaaccaaccgaatggagtaaaataaatatcattaatatatgctctagatattagtatttttatcaatcctttgattatcatcttctcgtaggcgaatgattccatgatcaagagtgatttaagaacatcctccggagtattaatgggcttagtaaacagtccatcgttgcaataataaaagttatccaagttaaaggatattatgcattcgtttaaagatatcacctcatctgacggagacaattttttggtaggttttagagactttgaagctacttgtttaacaaagttattcatcgtcgtttactattctatttaattttgtagttaatttatcacatatcacattaattgactttttggtccatttttccatacgtttatattcttttaatcctgcgttatccgtttccgttatatccagggatagatcttgcaagttaaatagaatgctcttaaataatgtcatttttttatccgctaaaaatttaaagaatgtataaacttttttcaaagatttaaaacttttaggtggagttctagtacacaatatcataaacaaactaataaacatcccgcattcagattccaacagctgattaacttccacattaatacagcctattttcgctccaaatgtacattcgaaaaatctgaataaaacatcgatgtcacaatttgtattatccaatacagaatgtctgtgattcgtgttaaaaccatcggagaaggaatagaaataaaaattattatagtggtggaattcagttggaatattgcctccggagtcataaaaggatactaaacattgttttttatcataaattacacatttccaatgagacaaataacaaaatccaaacattacaaatctagaggtagaacttttaattttgtctttaagtatatacgataagatatgtttattcataaacgcgtcaaatttttcatgaatcgctaaggagtttaagaatctcatgtcaaattgtcctatataatccacttcggatccataagcaaactgagagactaagttcttaatacttcgattgctcatccaggctcctctctcaggctctattttcatcttgacgacctttggattttcaccagtatgtattcctttacgtgataaatcatcgattttcaaatccatttgtgagaagtctatcgccttagatactttttcccgtagtcgaggtttaaagaaatacgctaacggtatactagtaggtaactcaaagacatcatatatagaatggtaacgcgtctttaactcgtcggttaactctttcttttgatcgagttcgtcgctactattgggtctgctcaggtgccccgactctactagttccaacatcataccgataggaatacaagacactttgccagcggttgtagatttatcatatttctccactacatatccgttacaatttgttaaaaatttagatacatctatattgctacataatccagctagtgaatatatatgacataataaattggtaaatcctagttctggtattttactaattactaaatctgtatatctttccatttatcatggaaaagaatttaccagatatcttcttttttccaaactgcgttaatgtattctcttacaaatattcacaagatgaattcagtaatatgagtaaaacggaacgtgatagtttctcattggcggtgtttccagttataaaacatagatggcataacgcacacgttgtaaaacataaaggaatatacaaagttagtacagaagcacgtggaaaaaaagtatctcctccatcactaggaaaacccgcacacataaacctaaccgcgaagcaatatatatacagtgaacacacaataagctttgaatgttatagttttctaaaatgtataacaaatacagaaatcaattcgttcgatgagtatatattaagaggactattagaagctggtaatagtttacagatattttccaattccgtaggtaaacgaacagatactataggtgtactagggaataagtatccatttagcaaaattccattggcctcattaactcctaaagcacaacgagagatattttcagcgtggatttctcatagacctgtagttttaactggaggaactggagtgggtaagacgtcacaggtacccaagttattgctttggtttaattatttatttggtggattctctactctagataaaatcactgactttcacgaaagaccagtcattctatctcttcctaggatagctttagttagattgcatagcaataccattttaaaatcattgggatttaaggtactagatggatctcctatttctttacggtacggatctataccggaagaattaataaacaaacaaccaaaaaaatatggaattgtattttctacccataagttatctctaacaaaactatttagttatggcactcttattatagacgaagttcatgagcatgatcaaataggagatattattatagcagtagcgagaaagcatcatacgaaaatagattctatgtttttaatgactgccacgttagaggatgacagggaacggctaaaagtatttttacctaatcccgcatttatacatattcctggagatacactgtttaaaattagcgaggtatttattcataataagataaatccatcttccagaatggcatacatagaagaagaaaagagaaatttagttactgctatacagatgtatactcctcctgatggatcatccggtatagtctttgtggcatccgttgcacagtgtcacgaatataaatcatatttagaaaaaagattaccgtatgatatgtatattattcatggtaaggtcttagatatagacgaaatattagaaaaagtgtattcatcacctaatgtatcgataattatttctactccttatttggaatccagcgttactatacacaatgttacacacatttatgatatgggtagagtttttgtccccgctccttttggaggatcgcaacaatttatttctaaatctatgagagatcaacgaaaaggaagagtaggaagagttaatcctggtacatacgtctatttctatgatctgtcttatatgaagtctatacagcgaatagattcagaatttctacataattatatattgtacgctaataagtttaatctaacactccccgaagatttgtttataatccctacaaatttggatattctatggcgtacaaaggaatatatagactcgttcgatattagtacagaaacatggaataaattattatccaattattatatgaagatgatagagtatgctaaactttatgtactaagtcctattctcgctgaggagttggataactttgagaggacgggagaattaactagtattgtacgagaagccattttatctctaaatttacgaattaagattttaaattttaaacataaagatgatgatacgtatatacacttttgtaaaatattattcggtgtctataacggaacaaacgctactatatattatcatagacctctaacgggatatatgaatatgatttcagatactatatttgttcctgtagataataactaaaaatcaaactctaatgaccacatctttttttagagatgaaaaattttctacatctccttttgtagacacgactaaacattttgcagaaaaaagtttattagtgtttagataatcgtatacttcatcagtgtagatagtaaatgtgaacagataaaaggtattcttgctcaatagattggtaaattccatagaatatattaatcctttcttcttgagatcccacatcatttcaaccagagacgttttatccaatgatttacctcgtactataccacatacaaaactagattttgcagtgacgtcgtacctggtattcctaccaaacaaaattttacttttagttcttttagaaaattctaaggtagaatctctatttgccaatatgtcatctatggaattaccactagcaaaaaatgatagaaatatatattgatacatcgcagctggttttgatctactatactttaaaaacgaatcagattccataattgcctgtatatcatcagctgaaaaactatgttttacacgtattccttcggcatttctttttaatgatatatcttgtttagacaatgataaagttatcatgtccatgagagacgcgtctccgtatcgtataaatatttcattagatgttagacgcttcattaggggtatacttctataaggtttcttaatcagtccatcattggttgcgtcaagaactactatcggatgttgttgggtatctctagtgttacacatggccttactaaagtttgggtaaataactatgatatctctattaattatagatgcatatatttcattcgtcaaggatattagtatcgacttgctatcgtcattaatacgtgtaatgtaatcatataaatcatgcgatagccaaggaaaatttaaatagatgttcatcatataatcgtcgctataattcatattaatacgttgacattgactaatttgtaatatagcctcgccacgaagaaagctctcgtattcagtttcatcgataaaggataccgttaaatataactggttgccgatagtctcatagtctattaagtggtaagtttcgtacaaatacagaatccctaaaatattatctaatgttggattaatctttaccataactgtataaaatggagacggagtcataactattttaccgtttgtacttactggaatagatgaaggaataatctccggacatgctggtaaagacccaaatgtctgtttgaagaaatccaatgttccaggtcctaatctcttaacaaaaattacgatattcgatcccgatatcctttgcattctatttaccagcatatcacgaactatattaagattatctatcatgtctattctcccaccgttatataaatcgcctccgctaagaaacgttagtatatccatacaatggaatacttcatttctaaaatagtattcgttttctaattctttaatgtgaaatcgtatactagaaagggaaaaattatctttgagttttccgttagaaaagaaccacgaaactaatgttctgattgcgtccgattccgttgctgaattaatggatttacaccaaaaactcatataacttctagatgtagaagcattcgctaaaaaattagtagaatcaaaggatataagtagatgttccaacaagtgagcaattcccaagatttcatctatatcattctcgaatccgaaattagaaattcccaagtagatatcctttttcatccgatcgttgatgaaaatacgaactttattcggtaagacaatcatttactaaggagtaaaataggaagtaatgttcgtatgtcgttatcatcgtataaattaaaggtgtgttttttaccattaagtgacattataattttaccaatattggaattataatataggtgtatttgcgcactcgcgacggttgatgcatcggtaaatatagctgtatctaatgttctagtcggtatttcatcatttcgctgtctaataatagcgttttctctatctgtttccattacagctgcctgaagtttattggtcggataatatgtaaaataataagaaatacatacgaataacaaaaataaaataagatataataaagatgccatttagagatctaattttgttcaacttgtccaaattcctacttacagaagatgaggaatcgttggagatagtgtcttccttatgtagaggatttgaaatatcttatgatgacttgataacttactttccagataggaaataccataaatatatttataaagtatttgaacatgtagatttatcggaggaattaagtatggaattccatgatacaactttgcgagatttagtttatcttagattgtacaagtattccaagtgtatacggccgtgttataaattaggagataatctaaaaggcatagttgttataaaggacaggaatatttatattagggaagcaaatgatgacttgatagaatatctcctcaaggaatacactcctcagatttatacatattctaatgagcgcgtccccataactggttcaaaattaattctttgtggattttctcaagttacatttatggcgtatacaacgtcgcatataacaacaaataaaaaggtagatgttctcgtttccaaaaaatgtatagatgaactagtcgatccaataaattatcaaatacttcaaaatttatttgataaaggaagcggaacaataaacaaaatactcaggaagatattttattcggtaaccggtggccaaactccataggtagctttttctatttcggattttagaatttccaaattcaccagcgatttatcggttttggtgaaatccaaggatttattaatgtccacaaatgccatttgttttgtctgtggattgtatttgaaaatggaaacgatgtagttagatagatgcgctgcgaagtttcctattagggttccgcgcttcacgtcacccagcatacttgaatcaccatcctttaaaaaaaatgataagatatcaacatggagtatatcatactcggattttaattcttctactgcatcactgacattttcacaaatactacaatacggtttaccgaaaataatcagtacgttcttcatttatgggtatcaaaaacttaaaatcgttactgctggaaaataaatcactgacgatattagatgataatttatacaaagtatacaatggaatatttgtggatacaatgagtatttatatagccgtcgccaattgtgtcagaaacttagaagagttaactacggtattcataaaatacgtaaacggatgggtaaaaaagggagggcatgtaaccctttttatcgatagaggaagtataaaaattaaacaagacgttagagacaagagacgtaaatattctaaattaaccaaggacagaaaaatgctagaattagaaaagtgtacatccgaaatacaaaatgttaccggatttatggaagaagaaataaaggcaaaaatgcaattaaaaatcgataaacttacatttcaaatatatttatctgattctgataacataaaaatatcattgaatgagatactaacacatttcaacaataatgagaatgttacattattttattgtgatgaacgagacgcagaattcgttatgtgtctcgaggctaaaacacatttctctaccacaggagaatggccgttgataataagtaccgatcaggatactatgctatttgcatctactgataatcatcctaagatgataaaaaacttaactcaactgtttaaatttgttccctcggcagaggataactatttagcaaaattaacggcgttagtgaatggatgtgatttctttcctggactctatggggcatctataacacccaccaacttaaacaaaatacaattgtttagtgattttacaatcgataatatagtcactagtttggcaattaaaaattattatagaaagactaactctaccgtagacgtgcgtaatattgttacgtttataaacgattacgctaatttagacgatgtctactcgtatgttcctccttgtcaatgcactgttcaagaatttatattttccgcattagatgaaaaatggaatgaatttaaatcatcttatttagagaccgttccgttaccctgtcaattaatgtacgcgttagaaccacgtaaggagattgatgtttcagaagttaaaactttatcatcttatatagatttcgaaaatactaaatcagatatcgatgttataaaatctatatcctcgatttttggatattctaacgaaaactgtaacacgatagtattcggcatctataaggataatttactactgagtataaataattcattttactttaacgatagtctgttaataaccaatactaaaagtgataatataataaatataggttactagattaaaaatggtgttccaactcgtgtgctctacatgcggtaaagatatttctcacgaacgatataaattgattatacgaaaaaaatcattaaaggatgtactcgtcagtgtaaagaacgaatgttgtaggttaaaattatctacacaaatagaacctcaacgtaacttaacagtgcaacctctattggatataaactaatatggatccggttaattttatcaagacatatgcgcctagaggttctattatttttattaattataccatgtcattaacaagtcatttgaatccatcgatagaaaaacatgtgggtatttattatggtacgttattatcggaacacttggtagttgaatctacctatagaaaaggagttcgaatagtcccattggatagtttttttgaaggatatcttagtgcaaaagtatacatgttagagaatattcaagttatgaaaatagcagctgatacgtcattaactttattgggtattccgtatggatttggtcatgatagaatgtattgttttaaattggtagctgactgttataaaaatgccggtgttgaaacatcgtctaaacgaatattaggtaaagatatttttctgagccaaaacttcacagacgataatagatggataaagatatatgattctaataatttaacattttggcaaattgattaccttaaagggtgagttaatatgcataactactcctccgttgttttttccctcgttctttttcttaacgttgtttgccatcactctcataatgtaaagatattctaaaatggtaaacttttgcatatcggacgcagaaattggtataaatgttgtaattgtattatttcccgtcaatggactagtcacagctccatcagttttatatcctttagagtatttctcactcgtgtctaacattctagagcattccatgatctgtttatcgttgatattggccggaaagatagattttttattttttattatattactattggcaattgtagatataacttctggtaaatatttttctaccttttcaatctcttctattttcaagccggctatatattctgctatattgttgctagtatcaataccttttcttgctaagaagtcatatgtggtattcactatatcagttttaactggtagttccattagcctttccacttctgcagaataatcagaaattggttctttaccagaaaatccagctactataataggctcaccgatgatcattggcaaaatcctatattgtaccagattaatgagagcatatttcatttccaataattctgctagttcttgagacattgatttatttgatgaatctagttggttctctagatactctaccatttctgccgcatacaataacttgttagataaaatcagggttatcaaagtgtttagcgtggctagaatagtgggcttgcatgtattaaagaatgcggtagtatgagtaaaccgttttaacgaattatatagtctccagaaatctgtggcgttacatacatgagccgaatgacatcgaagattgtccaatatttttaatagctgctctttgtccattatttctatatttgactcgcaacaattgtagataccattaatcactgattcctttttcgatgccggacaatagcacaattgtttagctttggactctatgtattcagaattaatagatatatctcttaatacagattgcactatacattttgaaactatgtcaaaaattgtagaacgacgctgttctgcagccatttaactttaaataatttacaaaaatttaaaatgagcatccgtataaaaatcgataaactgcgccaaattgtggcatatttttcagagttcagtgaagaagtgtctataaatgtagactcgacggatgagttaatgtatatttttgccgccttgggcggatctgtaaacatttgggccattatacctctcagtgcatcagtgttctaccgcggagccgaaaatattgtgtttaatcttccggtgtccaaggtaaaatcgtgtttgtgtagttttcacaatgatgccatcatagatatagaacctgatctggaaaataatctagtaaaactttctagttatcatgtagtaagtgtcgattgtaacaaggaactgatgcctattaggacagatactactatttgtctaagtatagatcaaaagaaatcttacgtgtttaattttcacaagtatgaagaaaaatgttgtggtagaaccgtcattcatttagaatggttgttgggctttatcaagtgtattagtcagcatcagcatttggctattatgtttaaagatgacaatattattatgaagactcctggtaatactgatgcgttttccagggaatattctatgactgaatgttctcaagaactacaaaagttttctttcaaaatagctatctcgtctctcaacaaactacgaggattcaaaaagagagtcaatgtttttgaaactagaatcgtaatggataatgacgataacattctaggaatgttgttttcggatagagttcaatcctttaagatcaacatctttatggcgtttttagattaatactttcaatgagataaatatgggtggcggagtaagtgttgagctccctaaacgggatccgcctccgggagtacccactgatgagatgttattaaacgtggataaaatgcatgacgtgatagctcccgctaagcttttagaatatgtgcatataggaccactagcaaaagataaagaggataaagtaaagaaaagatatccagagtttagattagtcaacacaggacccggtggtctttcggcattgttaagacaatcgtataatggaaccgcacccaattgctgtcgcacttttaatcgtactcattattggaagaaggatggaaagatatcagataagtatgaagagggtgcagtattagaatcgtgttggccagacgttcacgacactggaaaatgcgatgttgatttattcgactggtgtcagggggatacgttcgatagaaacatatgccatcagtggatcggttcagcctttaataggagtgatagaactgtagagggtcaacaatcgttaataaatctgtataataagatgcaaacattatgtagtaaagatgctagtgtaccaatatgtgaatcatttttgcatcatttacgcgcacacaatacagaagatagcaaagagatgatcgattatattctaagacaacagtctgcggactttaaacagaaatatatgagatgtagttatcccactagagataagttagaagagtcattaaaatatgcggaacctcgagaatgttgggatccagagtgttcgaatgccaatgttaatttcttactaacacgtaattataataatttaggactttgcaatattgtacgatgtaatactagcgtgaacaacttacagatggataaaacttcctcattaagattgtcatgtggattaagcaatagtgatagattttctactgttcccgtcaatagagcaaaagtagttcaacataatattaaacattcgttcgacctaaaattgcatttgatcagtttattatctctcttggtaatatggatactaattgtagctatttaaatgggtgccgcggcaagcatacagacgacggtgaatacactcagcgaacgtatctcgtctaaattagaacaagaagcgaacgctagtgctcaaacaaaatgtgatatagaaatcggaaatttttatatccgacaaaaccatggatgtaacctcactgttaaaaatatgtgctctgcggacgcggatgctcagttggatgctgtgttatcagccgctacagaaacatatagtggattaacaccggaacaaaaagcatacgtgccagctatgtttactgctgcgttaaacattcagacaagtgtaaacactgttgttagagattttgaaaattatgtgaaacagacttgtaattctagcgcggtcgtcgataacaaattaaagatacaaaacgtaatcatagatgaatgttacggagccccaggatctccaacaaatttggaatttattaatacaggatctagcaaaggaaattgtgccattaaagcgttgatgcaattgacgactaaggccactactcaaatagcacctagacaagttgctggtacaggagttcagttttatatgattgttatcggtgttataatattggcagcgttgtttatgtactatgccaagcgtatgctgttcacatccaccaatgataaaatcaaacttattttagccaataaggaaaacgtccattggactacttacatggacacattctttagaacttctccgatggttattgctaccacggatatacaaaactgaaaatatattgataatattttaatagattaacatggaagttatcgctgatcgtctagacgatatagtgaaacaaaatatagcggatgaaaaatttgtagattttgttatacacggtctagagcatcaatgtcctgctatacttcgaccattaattaggttgtttattgatatactattatttgttatagtaatttatatttttacggtacgtctagtaagtagaaattatcaaatgttgttggtggcgctagtcatcacattaactattttttattactttatactataatagtactagactgacttctaacaaacatctcacctgccataaataaatgcttgatattaaagtcttctatttctaacactattccatctgtggaaaataatactctgacattatcgctaattgacacatcggtgagtgatatgcctataaagtaataatcttctttgggcacatataccagtgtaccaggttctaacaacctatttactggtgctcctgtagcatactttttctttaccttgagaatatccatcgtttgcttggtcaatagcgatatgtgattttttatcaaccactcgaaaaagtaattggagtgttcatatcctctacgggctattgtctcatggccgtgtatgaaatttaagtaacacgactgtggtagatttgttctatagagccggttgccgcaaatagatagaactaccaatatgtctgtacaaatgttaaacattaattgattaacagaaaaaacaatgttcgttctgggaatagaaaccagatcaaaacaaaattcgttagaatatatgccacgtttatacattgaatataaaataactacagtttgaaaaataacagtatcatttaaacatttaacttgcggggttaatctcacaactttactgtttttaaactgttcaaaatatagcatcgatccatgagaaatacgtttagccgcctttaatagaggaaatcccaccgcctttctggatctcaccaacgacgatagttctgaccagcaactcatttcttcatcatccacctgttttaacatataataggcaggagatagatatccgtcattgcaatattccttctcgtaggcacacaatctaatattgataaaatctccattctcttctctgcatttattatcttgtttcggtggctgattaggctgtagtcttggtttaggctttggtatatcgttgttgaatctattttggtcattaaatctttcatttcttcctggtatatttttatcacctcgtttggttggatttttgtctatattatcgtttgtaacatcggtacgggtattcatttatcacaaaaaaaacttctctaaatgagtctactgctagaaaacctcatcgaagaagataccatattttttgcaggaagtatatctgagtatgatgatttacaaatggttattgccggcgcaaaatccaaatttccaagatctatgctttctatttttaatatagtacctagaacgatgtcaaaatatgagttggagttgattcataacgaaaatatcacaggagcaatgtttaccacaatgtataatataagaaacaatttgggtctaggagatgataaactaactattgaagccattgaaaactatttcttggatcctaacaatgaagttatgcctcttattattaataatacggatatgactgccgtcattcctaaaaaaagtggtaggagaaagaataagaacatggttattttccgtcaaggatcatcacctatcttgtgtattttcgaaactcgtaaaaagattaatatttataaagaaaatatggaatccgcatcgactgagtatacacctatcggagacaacaaggctttgatatctaaatatgcgggaattaatatcctaaatgtgtattctccttccacatccataagattgaatgccatttacggattcaccaataaaaataaactagagaaacttagtactaataaggaactagaatcgtatagttctagccctcttcaagaacccattaggttaaatgattttctgggactattggaatgtgttaaaaagaatattcctctaacagatattccgacaaaggattgattactataaatggagaatgttcctaatgtatactttaatcctgtgtttatagagcccacgtttaaacattctttattaagtgtttataaacacagattaatagttttatttgaagtattcgttgtattcattctaatatatgtattttttagatctgaattaaatatgttcttcatgcctaaacgaaaaatacccgatcctattgatagattacgacgtgctaatctagcgtgtgaagacgataaattaatgatctatggattaccatggatgacaactcaaacatctgcgttatcaataaatagtaaaccgatagtgtataaagattgtgcaaagcttttgcgatcaataaatggatcacaaccagtatctcttaacgatgttcttcgcagatgatgattcattttttaagtatttggctagtcaagatgatgaatcttcattatctgatatattgcaaatcactcaatatctagactttctgttattattattgatccaatcaaaaaataaattagaagccgtgggtcattgttatgaatctctttcagaggaatacagacaattgacaaaattcacagactttcaagattttaaaaaactgtttaacaaggtccctattgttacagatggaagggtcaaacttaataaaggatatttgttcgactttgtgattagtttgatgcgattcaaaaaagaatcctctctagctaccaccgcaatagatcctattagatacatagatcctcgtcgcgatatcgcattttctaacgtgatggatatattaaagtcgaataaagtgaacaataattaattctttattgtcatcatgaacggcggacatattcagttgataatcggccccatgttttcaggtaaaagtacagaattaattagacgagttggtaccaaaaattgaaaataaatacaaaggttcttgagggttgtgttaaattgaaagcgagaaataatcataaatactgcagaccatggagacacccaagcctaggatactgccctggctcgtgagccagctcgatctcggccaactcgaaggtgtcgcttggttggacgagtcaaggacaagattcagaataccctggaagcatggcctgagacaggatgctcagatggccgattttggtatttttcaagcttgggccgaagcttctggtgcttacacccccggcaaggataaacctgatgtgtccacttggaaacggaatttccggtctgccttgaaccggaaggaagtgttgcgcctcgccgcagataactctaaagatccttacgaccctcacaaagtttatgagtttgttactcccggggcaagagattttgtgcatcttggggcttcacccgatactaatggaaaaagtagtcttccccacagtcaggagaatcttcccaaactttttgatgggcttattctcgggcccttgaaggatgaggggagttccgatttggcaatagtctctgacccaagccagcaactgccatcaccaaacgtcaacaattttctcaatccagccccccaagagaacccccttaaacagcttcttgccgaggagcaatgggagttcgaagttactgccttctatcgcgggaggcaggtattccaacaaaccttgttttgtccaggaggcttgagactcgtgggcagcactgctgatatgactctgccctggcagccagtgaccctccccgaccctgaagggttcctgactgacaaactcgtgaaggagtacgtgggacaagtactgaagggcctgggaaatggtcttgccctctggcaagctggacagtgcttgtgggctcaacgccttggacattcacacgcattttgggccctcggggaggagcttcttcctgacagtggccgcggaccagatggcgaggtacataaggataaagatggtgcagtcttcgacctcagaccatttgtcgcagaccttatcgccttcatggaaggttccggtcacagccctagatatacactttggttctgtatgggggaaatgtggccacaagatcaaccttgggtcaagcgccttgttatggtaaaggtggtccctacatgtttgaaagagctgctcgaaatggctcgggaaggaggagcctcttctttgaaaactgtagacctgcacatatctaacagccaaccaatcagcctgacctccgatcagtacaaagcttaccttcaagaccttgtcgaggacatggacttccaagccacaggcaacatttgattaattaatttttatgagctcggaggtaatgatatgtatcaatcggtgtgtagaaagtgttacatcgactcataatattatattttttatctaaaaaactaaaaataaacattgattaaattttaatataatacttaaaaatggatgttgtgtcgttagataaaccgtttatgtattttgaggaaattgataatgagttagattacgaaccagaaagtgcaaatgaggtcgcaaaaaaactaccgtatcaaggacagttaaaactattactaggagaattattttttcttagtaagttacagcgacacggtatattagatggtgccaccgtagtgtatataggatcggctcctggtacacatatacgttatttgagagatcatttctataatttaggagtgatcatcaaatggatgctaattgacggccgccatcatgatcctattttaaatggattgcgtgatgtgactctagtgactcggttcgttgatgaggaatatctacgatccatcaaaaaacaactgcatccttctaagattattttaatttctgatgtaagatccaaacgaggaggaaatgaacctagtacggcggatttactaagtaattacgctctacaaaatgtcatgattagtattttaaaccccgtggcatctagtcttaaatggagatgcccgtttccagatcaatggatcaaggacttttatatcccacacggtaataaaatgttacaaccttttgctccttcatattcagctgaaatgagattattaagtatttataccggtgagaacatgagactgactcgagttaccaaattagacgctgtaaattatgaaaaaaagatgtactaccttaataagatcgtccgtaacaaagtagttgttaactttgattatcctaatcaggaatatgactattttcacatgtactttatgctgaggaccgtgtactgcaataaaacatttcctactactaaagcaaaggtactatttctacaacaatctatatttcgtttcttaaatattccaacaacatcaactgaaaaagttagtcatgaaccaatacaacgtaaaatatctagcaaaaattctatgtctaaaaacagaaatagcaagagatccgtacgcggtaataaatagaaacgtgctactgagatatactaccgatatagagtataatgatttagttactttaataaccgttagacataaaattgattctatgaaaactgtgtttcaggtatttaacgaatcatccataaattatactccggttgatgatgattatggagaaccaatcattataacatcgtatcttcaaaaaggtcataacaagtttcctgtaaattttctatacatagatgtggtaatatctgacttatttcctagctttgttagactagatactacagaaactaatatagttaatagtgtactacaaacaggcgatggtaaaaagactcttcgtcttcccaaaatgttagagacggaaatagttgtcaagattctctatcgccctaatataccattaaaaattgttagatttttccgcaataacatggtaactggagtagagatagccgatagatctgttatttcagtcgctgattaatcaattagtagagatgagataagaacattataataatcaataatattatcttatatctcgtttagaaaaatgctaatattaaaatagctaacgctagtaatccaatcggaagccatttgatatctataatagggtatctaatttcctgattcagatagcggacagctatattctcggtagctactcgtttggaatcacaaacattatttacatctaatttactatctgtaatggaaacgtttcccaatgaaatggtacaatccgatacattgcattttgttatatttttttttaaagaggctggtaacaacgcatcgcttcgtttacatggctcgtaccaacaataatagggtaatcttgtatctattcctatccgtactatgcttttatcaggataaatacatttacatcgtatatcgtctttgttagcatcacagaatgcataaatttgttcgtccgtcatgataaaaatttaaagtgtaaatataactattatttttatagttgtaataaaaagggaaatttgattgtatactttcggttctttaaaagaaactgacttgataaaaatggctgtaatctctaaggttacgtatagtctatatgatcaaaaagagattaatgctacagatattatcattagtcatgttaaaaatgacgacgatatcggtaccgttaaagatggtagactaggtgctatggatggggcattatgtaaaacttgtgggaaaacggaattggaatgtttcggtcactggggtaaagtaagtatttataaaactcatatagttaagcctgaatttatttcagaaattattcgtttactgaatcatatatgtattcactgcggattattgcgttcacgagaaccgtattccgacgatattaacctaaaagagttatcgggacacgctcttaggagattaaaggataaaatattatccaagaaaaagtcatgttggaacagcgaatgtatgcaaccgtatcaaaaaattactttttcaaagaaaaaggtttgtttcgtcaacaagttggatgatattaacgttcctaattctctcatctatcaaaagttaatttctattcatgaaaagttttggccattattagaaattcatcaatatccagctaacttattttatacagactactttcccatccctccgctgattattagaccggctattagtttttggatagatagtatacccaaagagaccaatgaattaacttacttattaggtatgatcgttaagaattgtaacttgaatgctgatgaacaggttatccagaaggcggtaatagaatacgatgatattaaaattatttctaataacactaccagtatcaatttatcatatattacatccggcaaaaataatatgattagaagttatatcgtcgcccgacgaaaagatcagaccgctagatctgtaattggtcccagtacatctatcaccgttaatgaggtaggaatgcccgcatatattagaaatacacttacagaaaagatatttgttaatgcctttacagtggataaagttaaacaactattagcgtcaaaccaagttaaattttactttaataaacgattaaaccaattaacaagaatacgccaaggaaagtttatcaaaaataaaatacatttattgcctggtgattgggtagaagtagctgttcaagaatatacaagtattatttttggaagacagccgtctctacatagatacaacgtcatcgcttcatctatcagagctaccgaaggagatactatcaaaatatctcccggaattgccaactctcaaaatgctgatttcgacggagatgaagaatggatgatattggagcaaaatcctaaagccgtaattgaacaaagtattcttatgtatccgacgacgttactcaaacacgatattcatggagcccccgtttatggatctattcaagatgaaatcgtagcagcgtattcattgtttaggatacaagatctttgtttagatgaagtattgaacatcttggggaaatatggaagagagttcgatcctaaaggtaaatgtaaattcagcggtaaagatatctatacttacttgataggtgaaaagattaattatccgggtctcttaaaggatggtgaaattattgcaaacgacgtagatagtaattttgttgtggctatgaggcatctgtcattggctggactcttatccgatcataagtcgaacgtggaaggtatcaactttattatcaagtcatcttatgtttttaagagatatctatctatttacggttttggggtgacattcaaagatctgagaccaaattcgacgttcactaataaattggaggccatcaacgtagaaaaaatagaacttatcaaagaagcatacgccaaatatctcaacgatgtaagagacgggaaaatagttccattatctaaagctttagaggcggactatgtggaatccatgttatccaacttgacaaatcttaatatccgagagatagaagaacatatgagacaaacgctgatagatgatccagataataacctcctgaaaatggccaaagcgggttataaagtaaatcctacagaactaatgtatattctaggtacgtatggacaacaaaggattgatggtgaaccagcagagactcgagtattgggtagagtcttaccttactatcttccagactctaaggatccagaaggaagaggttacattcttaattctttaacaaaaggattaacgggttctcaatattacttttcgatgctggttgccagatctcaatctactgatatcgtctgtgaaacatcacgtaccggaacactggctagaaaaatcattaaaaagatggaggatatggtggtcgacggatacggacaagtagttataggtaatacgctcatcaagtacgccgccaattataccaaaattctaggctcagtatgtaaacctgtagatcttatctatccagatgagtccatgacttggtatttggaaattagtgctctgtggaataaaataaaacagggattcgtttactctcagaaacagaaacttgcaaagaagacattggcgccgtttaatttcctagtattcgtcaaacccaccactgaggataatgctattaaggttaaggatctgtacgatatgattcataacgtcattgatgatgtgagagagaaatacttctttacggtatctaatatagattttatggagtatatattcttgacgcatcttaatccttctagaattagaattacaaaagaaacggctatcactatctttgaaaagttctatgaaaaactcaattatactctaggtggtggaactcctattggaattatttctgcacaggtattgtctgagaagtttacacaacaagccctgtccagttttcacactactgaaaaaagtggtgccgtcaaacaaaaacttggtttcaacgagtttaataacttgactaatttgagtaagaataagaccgaaattatcactctggtatccgatgatatctctaaacttcaatctgttaagattaatttcgaatttgtatgtttgggagaattaaatccagacatcactcttcgaaaagaaacagataaatatgtagtagatataatagttaatagattatacatcaagagagcagaaataaccgaattagttgtcgaatatatgattgaacgatttatctcctttagcgtcattgtaaaggaatggggtatggagacattcattgaggacgaggataatattagatttactgtctacctaaatttcgttgaaccggaagaattgaatcttagtaagtttatgatggttcttccgggtgccgccaacaagggcaagattagtaaattcaagattcctatctctgattatacgggttatgacgacttcaatcaaacaaaaaagctcaataagatgactgtagaactcatgaatctaaaagaattgggttctttcgatttggaaaacgtcaacgtgtatcctggagtatggaatacatacgatatcttcggtatcgaggccgctcgtgaatacttgtgcgaagccatgttaaacacctatggagaagggttcgattatctgtatcagccttgtgatcttctcgctagtttactatgtgctagttacgaaccagaatcagttaataaattcaagttcggtgcagctagtactcttaagagagctacgttcggagacaataaagcattgttaaacgcggctcttcataaaaagtcagaacctattaacgataatagtagctgccacttttttagcaaggtccctaatataggaactggatattacaaatactttatcgacttgggtcttctcatgagaatggaaaggaaactatctgataagatatcttctcaaaagatcaaggaaatggaagaaacagaagacttttaattcttatcaataacatatttttctatgatctgtcttttaaacgatggattttccacaaatgcgcctctcaagtccctcatagaatgatacacgtataaaaaatatagcataggcaatgactccttatttttagacattagatatgccaaaatcatagccccgcttctatttactcccgcagcacaatgaaccaacacgggctcgtttcgttgatcacatttagataaaaaggcggttacgtcgtcaaaatatttactaatatcggtagttgtatcatctaccaacggtatatgaataatattaatattagagttaggtaatgtatatttatccatcgtcaaatttaaaacatatttgaacttaacttcagatgatggtgcatccatagcatttttataatttcccaaatacacattattggttacccttgtcattatagtgggagatttggctttgtgcatatctccagttgaacgtagtagtaagtatttatacaaacttttcttatccatttataacgtacaaatggataaaactactttatcggtaaacgcgtgtaatttagaatacgttagagaaaaggctatagtaggcgtacaagcagccaaaacatcaacacttatattctttgttattatattggcaattagtgcgctattactctggtttcagacgtctgataatccagtctttaatgaattaacgagatatatgcgaattaaaaatacggttaacgattggaaatcattaacggatagcaaaacaaaattagaaagtgatagaggtagacttctagccgctggtaaggatgatatattcgacttcaaatgtgtggatttcggcgcctattttatagctatgcgattggataagaaaacatatctgccgcaagctattaggcgaggtactggagacgcgtggatggttaaaaaggcggcaaaggtcgatccatctgctcaacaattttgtcagtatttgataaaacacaagtctaataatgttattacttgtggtaatgagatgttaaatgaattaggttatagcggttattttatgtcaccgcattggtgttccgattttagtaatatggaatagtgttagataaatgcggtaacgaatgttcctgtaaggaaccataacagtttagatttaacgttaaagatgagcataaacataataaacaaaattacaatcaaacctataacattaatatcaaacaatccaaaaaatgaaatcagtggagtagtaaacgcgtacataactcctggataacgtttagcagctgccgttcctattctagaccaaaaattcggtttcatgttttcgaagcggtgttctgcaacaagtcggggatcgtgttctacatatttggcggcgttatccagtatctgcctattgatcttcatttcgttttcgattctggctatttcaaaataaaatcccgatgatagacctccagactttataatttcatctacgatgttcagcgccgtagtaactctaataatataggctgataagctaacatcataccctcctgtatatgtgaatatggcatgatttttgtccattacaagctcggttttaactttattgcctgtaataatttctctcatctgtaggatatctatttttttgtcatgcattgccttcaagacgggacgaagaaacgtaatatcctcaataacgttatcgttttctacaataactacatattctacctttttattttctaactcggtaaaaaaattagaatcccatagggctaaatgtctagcgatatttcttttcgtttcctctgtacacatagtgttacaaaaccctgaaaagaagtgagtatacttgtcatcatttctaatgtttcctccagtccactgtataaacgcataatccttgtaatgatctggatcatccttgactaccacaacatttcttttttctggcataacttcgttgtcctttacatcatcgaacttctgatcattaatatgctcatgaacattaggaaatgtttctgatggaggtctatcaataactggcacaacaataacaggagttttcaccgccgccatttagttattgaaattaatcatatacaactctttaatacgagttatattttcgtctatccattgtttcacatttacatatttcgacaaaaagatataaaatgcgtattccaatgcttctctgtttaatgaattactaaaatatacaaacacgtcactgtctggcaataaatgatatcttagaatattgtaacaatttattttgtattgcacatgttcgtgatctatgagttcttcttcgaatggcataggatctccgaatctgaaaacgtataaataggagttagaataataatatttgagagtattggtaatatataaactctttagcggtataattagtttttttctctcaatttctatttttagatgtgatggaaaaatgactaattttgtagcattagtatcatgaactctaatcaaaatcttaatatcttcgtcacacgttagctctttgaagtttttaagagatgcatcagttggttctacagatggagtaggtgcaacaattttttgttctacacatgtatgtactggagccattgttttaactataatggtgcttgtatcgaaaaactttaatgcagatagcggaagctcttcgccgcgactttctacatcgtaattgggttctaacgccgatctctgaatggatactagttttctaagttctaatgtgattctctgaaaatgtaaatccaattcctccggcattatagatgtgtatacatcggtaaataaaactatagtatccaacgatcccttctcgcaaattctagtcttaaccaaaaaatcgtatataaccacggagatggcgtatttaagagtggattcttctaccgttttgttcttggatgtcatataggaaactataaagtccgcactactgttaagaatgattactaacgcaactatatagttcaaattaagcattttggaaacataaaataactctgtagacgatacttgactttcgaataagtttgcagacaaacgaagaaagaacagacctctcttaatttcagaagaaaactttttttcgtattcctgacgtctagagtttatatcaataagaaagttaagaattagtcggttaatgttgtatttcattacccaagtttgagatttcataatattatcaaaagacatgataatattaaagataaagcgctgactatgaacgaaatagctatatggttcgctcaagaatatagtcttgttaaacgtggaaacgataactgtatttttaatcacgtcagcggcatctaaattaaatataggtatatttattccacacactctacaatatgccacaccatcttcataataaataaattcgttagcaaaattattaattttagtgaaatagttagcgtcaactttcatagcttccttcaatctaatttgatgctcacacggtgcgaattccactctaacatcccttttccatgcctcaggttcatcgatctctataatatctagtttcttgcgtttcacaaacacgggctcgtctctcgcgatgagatctgtatagtaactatgtaaatgataactagatagaaagatgtagctatatagatgacgatcctttaagagaggtataataactttaccccaatcagataaactattgttatggtcttcggaaaaagaatttttataaatttttccagtattttccaaatatacgtacttgacatctaaaaaatccttaatgataataggaatggataatccgtctattttataaagaaatacatatcgcacattatacttttttttggaaatgggaataccgatgtgtctacataaatatgcaaagtctaaatattttttagagaatcttagttggtccaaattcttttccaagtacggtaatagatttttcatattgaacggtatcttcttaatctctggttctagttccgcattaaatgatgaaactaagtcactatttttataactaacgattacatcacctctaacatcatcatttaccagaatactgatcttcttttgtcgtaaatacatgtctaatgtgttaaaaaaaagatcatacaagttatacgtcatttcatctgtggtattcttgtcattgaaggataaactcgtactaatctcttctttaacagcctgttcaaatttatatcctatatacgaaaaaatagcaaccagtgtttgatcatccgcgtcaatattctgttctatcgtagtgtataacaatcgtatatcttcttctgtgatagtcgatacgttataaaggttgataacgaaaatatttttatttcgtgaaataaagtcatcgtaggattttggacttatattcgcgtctagtagatatgcttttatttttggaatgatctcaattagaatagtctctttagagtccatttaaagttacaaacaactaggaaattggtttatgatgtataatttttttagtttttatagattctttattctatacttaaaaaatgaaaataaatacaaaggttcttgagggttgtgttaaattgaaagcgagaaataatcataaattatttcattatcgcgatatccgttaagtttgtatcgtaatggcgtggtcaattacaaataaagcggatactagtagcttcacaaagatggctgaaatcagagctcatctaaaaaatagcgctgaaaataaagataaaaacgaggatattttcccggaagatgtaataattccatctactaagcccaaaaccaaacgagccactactcctcgtaaaccagcggctactaaaagatcaaccaaaaaggaggaagtggaagaagaagtagttatagaggaatatcatcaaacaactgaaaaaaattctccatctcctggagtcagcgacattgtagaaagcgtggccgctgtagagctcgatgatagcgacggggatgatgaacctatggtacaagttgaagctggtaaagtaaatcatagtgctagaagcgatctttctgacctaaaggtggctaccgacaatatcgttaaagatcttaagaaaattattactagaatctctgcagtatcgacggttctagaggatgttcaagcagctggtatctctagacaatttacttctatgactaaagctattacaacactatctgatctagtcaccgagggaaaatctaaagttgttcgtaaaaaagttaaaacttgtaagaagtaaatgcgtgcacttttttataaagatggtaaactctttaccgataataattttttaaatcctgtatcagacgataatccagcgtatgaggttttgcaacatgttaaaattcctactcatttaacagatgtagtagtatatgaacaaacgtgggaggaggcgttaactagattaatttttgtgggaagcgattcaaaaggacgtagacaatacttttacggaaaaatgcatgtacagaatcgcaacgctaaaagagatcgtatttttgttagagtatataacgttatgaaacgaattaattgttttataaacaaaaatataaagaaatcgtccacagattccaattatcagttggcggtttttatgttaatggaaactatgttttttattagatttggtaaaatgaaatatcttaaggagaatgaaacagtagggttattaacactaaaaaataaacacatagaaataagtcccgatgaaatagttatcaagtttgtaggaaaggacaaagtttcacatgaatttgttgttcataagtctaatagactatataagccgctattgaaactgacggatgattctagtcccgaagaatttctgttcaacaaactaagtgaacgaaaggtatacgaatgtatcaaacagtttggtattagaatcaaggatctccgaacgtatggagtcaattatacgtttttatataatttttggacaaatgtaaagtccatatctcctcttccatcaccaaaaaagttaatagcgttaactatcaaacaaactgctgaagtggtaggtcatactccatcaatttcaaaaagagcttacatggcaacgactattttagaaatggtaaaggataaaaattttttagatgtagtatctaaaactacgttcgatgaattcctatctatagtcgtagatcacgttaaatcatctacggatggatgatatagatctttacacaaataattacaagaccgataaatggaaatggataagcgtatgaaatctctcgcaatgacagctttcttcggagagctaaacacattagatattatggcattgataatgtctatatttaaacgccatccaaacaataccattttttcagtggataaggatggtcagtttatgattgatttcgaatacgataattataaggcttctcaatatttggatctgaccctcactccgatatctggagatgaatgcaagactcacgcatcgagtatagccgaacaattggcgtgtgtggatattattaaagaggatattagcgaatatatcaaaactactccccgtcttaaacgatttataaaaaaataccgcaatagatcagatactcgtatcagtcgagatacagaaaagcttaaaatagctctagctaaaggcatagattacgaatatataaaagacgcttgttaataagtaaatgaaaaaaaactagtcgtttataataaaacacaatatggatgccaacatagtatcatcttctactattgcaacgtatatagacgctttagcaaagaatgcttcagaattagaacagaggtctaccgcatacgaaataaataatgaattggaactagtatttattaagccgccattaattactttgacaaatgtagtgaatatctctacgattcaggaatcgtttattcgatttaccgttactaataaggaaggtgtcaaaattagaactaagattccattatctaaggtacatggtctagatgtaaaaaatgtacagttagtagatgctatagataacatagtttgggaaaagaaatcattagtgacggaaaatcgtcttcacaaagaatgcttgttgagactatcgacagaggaacgtcatatatttttggattacaagaaatatggatcctctatccgactagaattagtcaatcttattcaagcaaaaacaaaaaactttacgatagactttaagctaaaatattttctaggatccggtgcccaatctaaaagttctttgttgcacgctattaatcatccaaagtcaaggcctaatacatctctggaaatagaattcacacctagagacaatgaaaaagttccatatgatgaactaataaaggaattgacgactctatcacgtcatatatttatggcttctccagagaatgtaattctttctccgcctattaacgcacctataaagacttttatgttgcctaaacaagatatagtaggtctggatctggaaaatctatatgccgtaactaagactgacggcattcctataactatcagagttacatcaaacgggttgtattgttattttacacatcttgggtatattattagatatccagttaagagaataatagattccgaagtagtagtctttggtgaggcagttaaggataagaactggaccgtatatctcattaagctaatagagcctgtgaatgcaatcaatgatagactagaagaaagtaagtatgttgaatctaaactagtggatatttgtgatcggatagtattcaagtcaaagaaatatgaaggtccgtttactacaactagtgaagtcgtcgatatgttatctacatatttaccaaagcaaccagaaggtgttattctgttctattcaaagggacctaaatctaacattgattttaaaattaaaaaggaaaatactatagaccaaactgcaaatgtagtatttaggtacatgtccagtgaaccaattatctttggagaatcgtctatctttgtagagtataagaaatttagcaacgataaaggctttcctaaagaatatggttctggtaagattgtgttatataacggcgttaattatctaaataatatctattgtttggaatatattaatacacataatgaagtgggtattaagtccgtggttgtacctattaagtttatagcagaattcttagttaatggagaaatacttaaacctagaatcgataaaaccatgaaatatattaactcagaagattattatggaaatcaacataatatcatagtcgaacatttaagagatcaaagcatcaaaataggagatatctttaacgaggataaactatcggatgtgggacatcaatacgccaataatgataaatttagattaaatccagaagttagttattttacgaataaacgaactagaggaccgttgggaattttatcaaactacgtcaagactcttcttatttctatgtattgttccaaaacatttttagacgattccaacaaacgaaaggtattggcgattgattttggaaacggtgctgacctggaaaaatacttttatggagagattgcgttattggtagcgacggatccggatgctgatgctatagctagaggaaatgaaagatacaacaaattaaactctggaattaaaaccaagtactacaaatttgactacattcaggaaactattcgatccgatacatttgtctctagtgtcagagaagtattctattttggaaagtttaatatcatcgactggcagtttgctatccattattcttttcatccgagacattatgctaccgtcatgaataacttatccgaactaactgcttctggaggcaaggtattaatcactaccatggacggagacaaattatcaaaattaacagataaaaagacttttataattcataagaatttacctagtagcgaaaactatatgtctgtagaaaaaatagctgatgatagaatagtggtatataatccatcaacaatgtctactccaatgactgaatacattatcaaaaagaacgatatagtcagagtgtttaacgaatacggatttgttcttgtagataacgttgatttcgctacaattatagaacgaagtaaaaagtttattaatggcgcatctacaatggaagatagaccgtctacaaaaaactttttcgaactaaatagaggagccattaaatgtgaaggtttagatgtcgaagacttacttagttactatgttgtttatgtcttttctaagcggtaaataataatatggtatgggttctgatatccccgttctaaatgcattaaataattccaatagagcgatttttgttcctataggaccttccaactgtggatactctgtattgttaatagatatattaatacttttgtcgggtaacagaggttctacgtcttctaaaaataaaagtttgataacatctggcctgttcataaataaaaacttggcgattctatatatactcttattatcaaatctagccattgtcttatagatgtgagctactgtaggtgtaccatttgattttctttctaatactatatatttctctcgaagaagttcttgcacatcatctgggaataaaatactactgttgagtaaatcagttattttttttatatcgatattgatggacatttttatagttaaggataataagtatcccaaagtcgataacgacgataacgaagtatttatacttttaggaaatcacaatgactttatcagatcaaaattaacaaaattaaaggagcatgtatttttttctgaatatattgtgactccagatacatatggatctttatgcgtcgaattaaatgggtctagttttcagcacggtggtagatatatagaggtggaggaatttatagatgctggaagacaagttagatggtgttctacatccaatcatatatctgaagatatacccgaagatatacacactgataaatttgtcatttatgatatatacacttttgacgctttcaagaataaacgattggtattcgtacaggtacctccgtcgttaggagatgatagctatttgactaatccgttattgtctccgtattatcgtaattcagtagccagacaaatggtcaatgatatgatttttaatcaagattcatttttaaaatatttattagaacatctgattagaagccactatagagtttctaaacatataacaatagttagatacaaggataccgaagaattaaatctaacgagaatatgttataatagagataagtttaaggcgtttgtattcgcttggtttaacggcgtttcggaaaatgaaaaggtactagatacgtataaaaaggtatctaatttgatataatgaattcagtgactgtatcacacgcgccatatactattacttatcacgatgattgggaaccagtaatgagtcaattggtagagttttataacgaagtagccagttggctgctacgagacgagacgtcgcctattcctgataagttctttatacagttgaaacaaccgcttagaaataaacgagtatgtgtgtgcggtatagatccgtatccgaaagatggaactggtgtaccgttcgaatcaccaaattttacaaaaaaatcaattaaggagatagcttcatctatatctagattaaccggagtaattgattataaaggttataaccttaatataatagacggggttataccctggaattattacttaagttgtaaattaggagaaacaaaaagtcacgcgatctactgggataagatttccaagttactgctgcagcatataactaaacacgttagtgttctttattgtttgggtaaaacagatttctcgaatatacgggcaaagttagaatccccggtaactaccatagtgggatatcatccagcggctagagaccgtcaattcgagaaagatcgatcatttgaaattatcaacgttttactggaattagacaacaaggtacctataaattgggctcaagggtttatttattaatgctttagtgaaattttaacttgtgttctaaatggatgcggctattagaggtaatgatgttatctttgttcttaagactataggtgtcccgtcagcgtgcagacaaaatgaagatccaagatttgtagaagcatttaaatgcgacgagttagaaagatatattgagaataatccagaatgtacactattcgaaagtcttagggatgaggaagcatactctatagtcagaattttcatggatgtagatttagacgcgtgtctagacgaaatagattatttaacggctattcaagattttattatcgaggtgtcaaactgtgtagctagattcgcgtttacagaatgcggcgccattcatgaaaatgtaataaaatccatgagatctaatttttcattgactaagtctacaaatagagataaaacaagttttcatattatctttttagacacgtataccactatggatacattgatagctatgaaacgaacactattagaattaagtagatcatctgaaaatccactaacaagatcgatagacactgccgtatataggagaaaaacaactcttcgggttgtaggtactaggaaaaatccaaattgcgacactattcatgtaatgcaaccacctcatgataatatagaagattacctattcacttacgtggatatgaacaacaatagttattacttttctctacaacgacgattggaggatttagttcctgataagttatgggaaccagggtttatttcattcgaagacgctataaaaagagtttcaaaaatattcattaattctataataaactttaatgatctcgatgaaaataattttacaacggtaccactggtcatagattacgtaacaccttgtgcattatgtaaaaaacgatcgcataaacatccgcatcaactatcgttggaaaatggtgctattagaatttacaaaactggtaatccacatagttgtaaagttaaaattgttccgttggatggtaataaactgtttaatattgcacaaagaattttagacactaactctgttttattaaccgaacgaggagaccatatagtttggattaataattcatggaaatttaacagcgaagaacccttgataacaaaactaattttgtcaataagacatcaactacctaaggaatattcaagcgaattactctgtccaagaaaacgaaagactgtagaagctaacatacgagacatgttagtagattcagtggagaccgatacctatccggataaacttccgtttaaaaatggtgtattggacctggtagacggaatgttttactctggagatgatgctaaaaaatatatgtgtactgtatcaaccggatttaaatttgacgatacaaagttcgtcgaagacagtccagaaatggaagagttaatgaatatcattaacgatatccaaccattaacggatgaaaataagaaaaatagagagctatatgaaaaaacattatctagttgtttatgcggtgctaccaaaggatgtttaacattcttttttggagaaactgcaactggaaagtcgacaaccaaacgtttgttaaagtctgctatcggtgacctgtttgttgagacgggtcaaacaattttaacagatgtattggataaaggacctaatccatttatcgctaacatgcatttgaaaagatctgtattctgtagcgaactacctgattttgcatgtagtgggtcaaagaaaatcagatctgataatattaaaaagttgacagaaccttgtgtcattggaagaccgtgtttctccaataaaattaataatagaaaccatgcgacaatcattatcgatactaattacaaacctgtttttgataggatagataacgcattaatgagaagaattgccgtcgtgcgattcagaacacacttttctcaaccttctggtagagaggctgctgaaaataatgacgcgtacgataaagtcaaactattagacgaggggttagatggtaaaatacaaaataatagatatagattcgcatttctatacttgttggtgaaatggtacagaaaatatcatgttcctattatgaaactatatcctacacccgaagagattcctgactttgcattctatctcaaaataggtactctgttggtatctagctctgtaaagcatattccattaatgacggacctctccaaaaagggatatatattgtacgataatgtggtcactcttccgttgactactttccaacagaaaatatccaagtattttaattctagactatttggacacgatatagagagcttcatcaatagacataagaaatttgccaatgttagtgatgaatatctgcaatatatattcatagaggatatttcatctccgtaaatatatgctcatatatttatagaagatatcacatatctaaatgaataccggaattatagatttatttgataatcatgttgatagtataccaactatattacctcatcagttagctactctagattatctagttagaactatcatagatgagaacagaagcgtgttattgttccatattatgggatcaggtaaaacaataatcgctttgttgttcgccttggtagcttccagatttaaaaaggtttacattctagtgccgaacatcaacatcttaaaaattttcaattataatatgggtgtagctatgaacttgtttaatgacgaattcatagctgagaatatctttattcattccacaacaagtttttattctcttaattataacgataacgtcattaattataacggattatctcgctacaataactctatttttatcgttgatgaggcacataatatctttgggaataatactggagaacttatgaccgtgataaaaaataaaaacaagattccttttctactattgtctggatctcccattactaacacacctaatactctgggtcatattatagatttaatgtccgaagagacgatagattttggtgaaattattagtcgtggtaagaaagtaattcagacacttcttaacgaacgcggtgtgaatgtacttaaggatttgcttaaaggaagaatatcatattacgaaatgcctgataaagatctaccaacgataagatatcacggacgtaagtttctagatactagagtagtatattgtcacatgtctaaacttcaagagagagattatatgattactagacgacagctatgttatcatgaaatgtttgataaaaatatgtataacgtgtcaatggcagtattgggacaacttaatctgatgaataatttagatactttatttcaggaacaggataaggaattgtacccaaatctgaaaataaataatggcgtgttatacggagaagaattggtaacgttaaacattagttccaaatttaaatactttattaatcggatacagacactcaacggaaaacattttatatacttttctaattctacatatggcggattggtaattaaatatatcatgctcagtaatggatattctgaatataatggttctcagggaactaatccacatatgataaacggcaaaccaaaaacatttgctatcgttactagtaaaatgaaatcgtctttagaggatctattagatgtgtataattctcctgaaaacgatgatggtagtcaattgatgtttttgttttcatcaaacattatgtccgaatcctatactctaaaagaggtaaggcatatttggtttatgactatcccagatactttttctcaatacaaccaaattcttggacgatctattagaaaattctcttacgccgatatttctgaaccagttaatgtatatcttttagccgccgtatattccgatttcaatgacgaagtgacgtcattaaacgattacacacaggatgaattaattaatgttttaccatttgacatcaaaaagctgttatatctaaaatttaagacgaaagaaacgaatagaatatactctattcttcaagagatgtctgaaacgtattctcttccaccacatccatcaattgtaaaagttttattgggagaattggtcagacaatttttttataataattctcgtattaagtataacgataccaagttacttaaaatggttacatcagttataaaaaataaagaagacgctaggaattacatagatgatattgtaaacggtcacttctttgtatcgaataaagtatttgataaatctcttttatacaaatacgaaaacgatattattacagtaccgtttagactttcctacgaaccatttgtttggggagttaactttcgtaaagaatataacgtggtatcttctccataaaactgatgagatatataaagaaataaatgtcgagctttgttaccaatggataccttccagttacattggagccacacgagctgacgttagacataaaaactaatattaggaatgccgtatataagacgtatctccatagagaaattagtggtaaaatggccaagaaaatagaaattcgtgaagacgtggaattacctctcggcgaaatagttaataattctgtagttataaacgttccgtgtgtaataacctacgcgtattatcacgttggggatatagttagaggaacattaaacatcgaagatgaatcaaatgtaactattcaatgtggagatttaatctgtaaactaagtagagattcgggtactgtatcatttagcgattcaaagtactgcttttttcgaaatggtaatgcgtatgacaatggcagcgaagtcactgccgttctaatggaggctcaacaaggtatcgaatctagttttgtttttctcgcgaatatcgtcgactcataagaaagagaatagcggtaagtataaacacgaatactatggcaataattgcgaatgttttattcccttcgatatatttttgataatatgaaaaacatgtctctctcaaatcggacaaccatctcataaaatagttatctcgcgctggcgaggtggttgccgctcgtataatctccccagaataatatacttgcgtgtcgtcgttcaatttatacggatttctatagttctctgttatataatgcggttttccatcatgattagacgacgacaatagtgttctaaatttagatagttgatcagaatgaatgtttattggcgttggaaaaattatccatgctgcgtctgcagagtggttgatagttgttcctagatatgtaaaataatccaacgtactaggtagcaaattgtctagataaaatactgaatcaaacggcgcagacgtattagcggatctaatggaatccaattgattgactatcttttgaaaatatacatttttatgatccgatacttgtaagaatatagaaataatgataagtccatcatcgtgtttttttgcctcttcataagaactatattttttcttattccaatgaacaagattaatctctccagagtatttgtacacatctatcaagtgattggatccataatcgtcttcctttccccaatatatatgtagtgatgataacacatattcattggggagaaaccctccacttatatatcctcctttaaaattaatccttactagttttccagtgttctggatagtggttggtttcgactcattataatgtatgtctaacggcttcaatcgcgcgttagaaattgcttttttagtttctatattaataggagatagttgttgcggcatagtaaaaatgaaatgataactgtttaaaaatagctcttagtatgggaattacaatggatgaggaagtgatatttgaaactcctagagaattaatatctattaaacgaataaaagatattccaagatcaaaagacacgcatgtgtttgctgcgtgtataacaagtgacggatatccgttaataggagctagaagaacttcattcgcgttccaggcgatattatctcaacaaaattcagattctatctttagagtatccactaaactattacggtttatgtactacaatgaactaagagaaatctttagacggttgagaaaaggttctatcaacaatatcgatcctcactttgaagagttaatattattgggtggtaaactagataaaaaggaatctattaaagattgtttaagaagagaattaaaagaggaaagtgatgaacgtataacagtaaaagaatttggaaatgtaattctaaaacttacaacacgggataaattatttaataaagtatatataggttattgcatggcgtgttttattaatcaatcgttggaggatttatcgcatactagtatttacaatgtagaaattagaaagattaaatcattaaatgattgtattaacgacgataaatacgaatatctgtcttatatttataatatgctagttaatagtaaatgaacttttacagatctagtataattagtcagattattaagtataatagacgactagctaagtctattatttgcaaggatgactctcaaattattacactcacggcattcgttaaccaatgcctatggtgtcataaacgagtatccgtgtccgctattttattaactactgataacaaaatattagtatgtaacagacgagatagttttctctattctgaaataattagaactagaaacatgtttagaaagaaacgattatttctgaattattccaattatttgtccaaacaggaaagaagtatactatcgtcatttttttctctatatccagctactgctgataatgatagaatagacgctatttatccgggtggcatacccaaaaggggtgagaatgttccagagtgtctatccagggaaatcaaagaagaagttaatatagacaattcttttgtattcatagacactcggttttttattcatggtatcatagaagataccattatcaacaaattttttgaggtaattttctttgtcggaagaatatctctaacgagtgatcaaattattgatacctttaaaagtaatcatgaaatcaaggatctaatatttttagatccgaattcaggtaatggactccaatacgaaattgcaaaatatgctctagatactgcaaaacttaaatgttacggccatagaggatgttattatgaatcattaaaaaaattaactgaggatgattgattagaaaatataaattaatttaccatcgtgtatttttataacgggattgtccggcatatcatgtagatagttaccgtctacatcgtatactcgaccatctacgcctttaaatcctctatttattgacattaatctattagaattggaataccaaatattagtaccctcaattagtttattggtaatattttttttagacgatagatcgatggctcttgaaaccaaggttttccaaccggactcattgtcgatcggtgagaagtctttttcattagcatgaatccattctaatgatgtatgtttaaacactctaaacaattggacaaattcttttgatttgctttgaatgatttcaaataggtcttcgtctacagtaggcataccattagataatctagccattataaagtgcacgtttacatatctacgttctggaggagtaagaacgtgactattgagacgaatggctcttcctactatctgacgaagagacgcctcgttccatgtcatatctaaaatgaagatatcattaattgagaaaaaactaataccctcgcctccactagaagagaatacgcatgttttaatgcattctccgttagtgtttgattcttggttaaactcagccaccgccttgattctagtatcttttgttctagatgagaactctatattagagataccaaagactttgaaatatagtaataagatttctattcctgactgattaacaaatggttcaaagactagacatttaccatgggatgctaatattcccaaacatacatctataaatttgacgcttttctcttttaattcagtaaatagagagatatcagccgcactagcatcccctttcaatagttctccctttttaaaggtatttaatgcggatttagaaaactctctatctcttaatgaatttttaaaatcattatatagtgttgctatctcttgcgcgtattcgccgggatcacgattttgtctttcaggaaagctatcgaacgtaaacgtagtagccatacgtctcagaattctaaatgatgatataccagtttttatttctgcgagtttagccttttgataaatctcttcttgcttttttgacatattaacgtatcgcattaatactgttttcttagcgaatgatgcagacccttctacgttatcaaaaatagaaaactcgttattaactatgtacgaacataggcctcctagtttggagactaattctttttcatcgactagacgtttattctcaaatagtgattggtgttgtaaggatcctggtcgtagtaagttaaccaacatggtgaattcttgcacactattgacgataggtgtagccgataaacaaatcatcttatggttttttaatgcgatggtcttggataaaaaattatatactgaacgagtaggacggatcttaccatcttctttgattaatgatttagaaatgaagttatgacattcatcaataatgacgcatattctactcttggaattaatagttttgatattagtaaaaaatttatttctaaaattttgatcatcgtaattaataaaaatacaatccttcgttatctctggagcgtatctgagtatagtgttcatccaaggatcttctatcaaagcctttttcaccaataagataatagcccaattcgtataaatatccttaagatgtttgagaatatatacagtagtcattgttttaccgacacccgtttcatggaacaataaaagagaatgcatactgtctaatcctaagaaaactcttgctacaaaatgttgataatccttgaggcgtactacgtccgaccccatcatttcaacgggcatattagtagttctgcgtaaggcataatcgatataggccgcgtgtgatttactcatttatgagtgataagtaataactatgttttaaaaatcacagcagtagtttaactagtcttctctgatgtttgttttcgatactttttgaatcagaagtcatactagaataaagcaacgagtgaacgtaatagagagcttcgtatactctattcgaaaactctaagaacttattaatgaattccgtatccactggattgtttaaaatactaaattgaacactgttcacatccttccaagaagaagacttagtgacggacttaacatgagacataaataaatccaaattttttttacaaacatcactagccaccataatggcgctatctttcaaccagctatcgcttacgcattttagcagtctaacatttttaaagagactacaatatattctcatagtatcgattacacctctaccgaataaagttggaagtttaataatacaatatttttcgtttacaaaatcaaataatggtcgaaacacgtcgaaggttaacatcttataatcgctaatgtatagattgttttcagtgagatgattattagatttaatagcatctcgttcacgtttgaacagtttattgcgtgcgctgaggtcggcaactacggcgtccgctttagtactcctcccataatactttacgctattaatctttaaaatttcatagactttatctagatcgctttctggtaacatgatatcatgtgtaaaaagttttaacatgtcggtcggcattctatttagatcattaactctagaaatctgaagaaagtaattagctccgtattccagactaggtaatgggcttttacctagagacagattaagttctggcaatgtttcataaaatggaagaaggacatgcgttccctcccggatattttttacaatttcatccatttacaactctatagtttgttttcattattattagttattatctcccataatcttggtaatacttaccccttgatcgtaagataccttatacaggtcattacatacaactaccaattgtttttgtacataatagattggatggttgacatccatggtggaataaactactcgaacagatagtttatctttccccctagatacattggccgtaatagttgtcggcctaaagaatatctttggtgtaaagttaaaagttagggttcttgttccattattgctttttgtcagtagttcattataaattctcgagatgggtccgttctctgaatatagaacatcatttccaaatctaacttctagtctagaaataatatcggtcttattcttaaaatctattcccttgatgaagggatcgttaatgaacaaatccttggcctttgattcggctgatctattatctccgttatagacgttacgttgactagtccaaagacttacaggaatagatgtatcgatgatgttgatactatgtgatatgtgagcaaagattgttctcttagtggcatcactatatgttccagtaatggcggaaaactttttagaaatgttatatataaaagaattttttcgtgttccaaacattagcagattagtatgaagataaacactcatattatcaggaacattatcaatttttacatacacatcagcatcttgaatagaaacgataccatcttctggaacctcaacaatctcggcagactccggataaccagtcggtggaccatcgctaacaataactagatcatccaacaatctactcacatatgcatctatataatctttttcatcttgtgagtaccctggatacgaaataaatttattatccgtatttccataataaggtttagtataaacagagagcgatgttgccgcatgaacttcagttacagtcgccgttggttggtttatttgacctattactctcctaggtttctctataaacgatggtttaatttgtacattcttaaccatatatccaataaagctcaattcaggaacataaacaaattctttgttgaacgtttcaaagtcgaacgaagagtcacgaataacgatatcggatactggattgaaggttaccgttacggtaatttttgaatcggatagtttaagactgctgaatgtatcttccacatcaaacggagttttaatataaacgtatactgtagatggttctttaatagtgtcattaggagttaggccaatagaaatatcattaagttcactagaatatccagagtgtttcaaagcaattgtattattgatacaattattatataattcttcgccctcaatttcccaaataacaccgttacacgaagagatagatacgtgattaatacatttatatccaacatatggtacgtaaccgaatcttcccatacctttaacttctggaagttccaaactcagaaccaaatgattaagcgcagtaatatactgatccctaatttcgaagctagcgatagcctgattgtctggaccatcgtttgtcataactccggatagagaaatatattgcggcatatataaagttggaatttgactatcgactgcgaagacattagaccgtttaatagagtcatccccaccgatcaaagaattaatgatagtattattcattttctatttaaaatggaaaaagcttacaataaactccgtagagaaatatctataatttgtgagttttccttaaagtaacagcttccgtaaacgccgtctttatctcttagtaagtttattgtatttataaccttttccttatcttcatagaatactaaaggcaacaaagaaatttttggttcttctctaagagctacgtgagacttaaccatagaagccaacgaatccctacatattttagaacagaaataccctacttcaccacccttgtatgtctcaatactaataggtctaaaaaccaaatcttgattacaaaaccaacacttatcaattacactatttgtcttaatagacacatctgccatagatttataatactttggtagtatacaagcgagtgcttcttctttagcgggcttaaagactgctttaggtgctgaaataaccacatctggaaggcttactcgcttagccatttaattacggaactatttttttatacttctaatgagcaagtagaaaacctctcatctacaaaaacatactcgtgtccataatcctctaccatagttacacgttttttagatctcatatgtgctaaaaagttttcccatactaattggttactattatttttcgtataatttttaacagtttgaggttttagatttttagttacagaagtgatatcgaatattttatccaaaaagaatgaataattaattgtcttagaaggagtgttttcttggcaaaagaataccaagtgcttaaatatttctactacttcattaatcttttctgtactcagattcagtttctcatcttttacttgattgattatttcaaagactaacttataatcctttttatttattctctcgttagccttaagaaaactagatacaaaatttgcatctacatcatccgtggatatttgatttttttccatgatatccaagagttccgagataatttctccagaacattgatgagacaataatctccgcaatacatttctcaaatgaataagtttattagacacgtggaagtttgactttttttgtacctttgtacatttttgaaataccgactcgcaaaaaatacaatattcatatccttgttcagatactataccgttgtgtctacaaccgctacataatcgtagattcatgttaacactctacgtatctcgtcgtccaatattttatataaaaacattttatttctagacgttgccagaaaatcctgtaatacttttagttttttgggctgtgaataaagtatcgccctaatatggttaccgtcctccgccaatatagtagttaaattatccgcacatgcaaaagaacaccgcttaggcggattcagtacaatgttatatttttcgtaccaactcatttaaatatcataatctaaaatagttctgtaatatgtctagcgctaatatattgatcataatcctgtgcataaattaagatacaacaatgtctcgaaatcatcgacatggcttcttccatagttagaagatcgtcgtcaaagttagcaacgtgattcatcaacatttgctgttttgaggcagcaaatactgaaccgtcgccattcaaccattcataaaaaccatcgtctgaatccattgataatttcttgtactggtttttgagagctcgcatcaatctagcatttctagctcccggattgaaaacagaaagaggatcgtacatccagggtccattttctgtaaatagaatcgtataatgtcccttcaagaagatatcagacgatccacaatcaaagaattggtctccgagtttgtaacaaactgcggactttaacctatacatgataccgtttagcataatttctggtgatacgtcaatcggagtatcatctattagagatctaaagccggtgtaacattctccaccaaacatattcttattctgacgtcgttctacataaaacatcattgctccattaacgataacaggggaatgaacagcactacccatcacattagttcccaatggatcaatgtgtgtaactccagaacatcttccatagcctatgttaggaggagcgaacaccactcttccactattgccatcgaatgccatagaataaatatccttggaattgatagaaatcggactgtcggatgttgtgatcatcttcataggattaacaacgatgtatggtgccgcctgaagtttcatatcgtaactgatgccgttcataggtctagccacagaaaccaacgtaggtctaaatccaactatagacaaaatagaagccaatatctgttcctcatctgtcataacttgagagcatccagtatgaataatcttcattagatggggatctaccgcatcatcatcgttacaataaaaaattcccattctaatgttcataattgcttttctaatcatggtatgcatgtttgctctctgaatctctgtggaaattagatctgatacacctgtaatcactatcggattatcctccgtaagacgattaaccaacaacatataattataagactttacttttctaaattcataaagttgctggattaggctataggtgtctccatgtacatacgcgttctcgagcgcaggaagtttaataccgaatagtgccatcagaataggatgaatatagtaattagtttctggttttctataaataaaagacaaatcttgtgaactagacatatcggtaaaatgcatggattggaatcgtgtagtcgacagaagaatatgatgattagatggagagtatattttatctaactctttgagttggtcaccgattctaggactagctcgagaatgaataagtactaaaggatgagtacatttcacagaaacactagcattgttcaatgtgctctttacatgggtaaggagttgaaatagctcgtttctatttgttctgacaatatttagtttattcataatgttaagcatatcctgaatagtaaagttagatgtgtcatacttgttagtagttagatatttagcaattgcattcccatcatttctcaatctcgtactccaatcatgcgtggatgctacttcgtcgatggaaaccatacaatcctttttgataggctgttgagattgattatttcctgcacgtttaggtttggtacgttgatttctagcccctgcggatataaagtcatcgtctacaatttgggacaatgaattgcatacactacaagacaaagatttatcagaagtgtgaatatgatcttcatctaccaaagaaagagtttgattagtataactagattttagtcctgcgttagatgttaaaaaaacatcgctattgaccacggcttccattatttatattcgtagtttttactcgaaagcgtgattttaatatccaatcttattacttttggaatcgttcaaaacctttgactagttgtagaatttgatctattgccctacgcgtatactcccttgcatcatatacgttcgtcaccagatcgtttgtttcggcctgaagttggtgcatatctttttcaacactcgacatgagatccttaagggccatatcgtctagattttgttgagatgctgctcctggatttggattttgttgtgctgttgtacatactgtaccaccagtaggtgtaggagtacatacagtggccacaataggaggttgaggaggtgtaaccgttggagtagtacaagaaatatttccatccgattgttgtgtacatgtagttgttggtaacgtctgagaaggttgggtagatggcggtgtcgtcgtcttttgatctttattaaatttagagataatatcctgaacagcattgctcggcgtcaacgctggaaggagtgaactcgccggcgcatcagtatctgcagacagccaatcaaaaagattagacatatcagatgatgtattagtttgttgtcgtggttttggtgtaggagcagtactactaggtagaagaataggagccgatgtaggtgtcggaaccggctgtggagttatatgaatagttggttgtagcggttggataggctgtctgctggcggccatcatattatctctagctagttgttctcgcaactgtctttgataatacgactcttgagactttagtcctatttcaatcgcttcatcctttttcgtatccggatccttttcttcagaataatagattgacgactttggtgtagaggattctgccagcccctgtgagaacttgttaaagaagtccatttaaggctttaaaattgaattgcgattataagattaaatggcagacacagacgatattatcgactatgaatccgatgatctcactgaatacgaggatgatgaagaagaggaagaagatggagagtcactagaaactagtgatatagatcccaaatcttcttataagattgtagaatcagcatccactcatatagaagatgcgcattccaatcttaaacatatagggaatcatatatctgctcttaaacgacgctatactagacgtataagtctatttgaaatagcgggtataatagcagaaagctataacttgcttcaacgaggaagattacctctagtttcagaattttctgacgaaacgatgaagcaaaatatgctacatgtaattatacaagagatagaggagggttcttgtcctatagtcatcgaaaagaacggagaattgttgtcggtaaacgattttgacaaagatggtctaaaattccatctagactatattatcaaaatttggaaacttcaaaaacgatattagaatttatacgaatatcgttctctaaatgtcacaatcaagtctcgcatgttcagcaatttattgtcgtactttatatcgtgttcattaacgatatcttgcaaaatagtaatgattctatcttccttcgatagatattcttcagagattattgtcttatattctttcttgttatcagatatgaatttgataagactttgaacattattgatacccgtctgtttaattttttctacagatattttagttttggcagattctatcgtatctgtcaatagacatccaacatcgacattcgacgtcaattgtctataaatcaacgtataaattttagaaataacattagcgaattgttgtgcattgatgtcgttattctgaaacagtatgattttaggtagcattttcttaacaaagagaacgtatttattgttactcagttgaacagatgatatatccagattactaacgcatctgattccgtataccaaactttcagaagaaatggtatacaattgtttgtattcattcaatgtctctttttcagaaattagtttagagtcgaatactgcaataattttcaagagatagttttcatcagataagattttatttagtgtagatatgataaaactattgttttgttggagaacttgatacgccgcgttctctgtagtcgacgctctcaaatgggaaacgatctccattatttttttggaatcggatactatatcttcggtatcttgacgcagtctagtatacatagagttaagagagattagagtttgtacattaagcaacatgtctctaaatgtggctacaaacttttccttttccacatcatctagtttattatataccgatttcacaacggcaccagatttaaggaaccagaatgaaaaactctgataactacaatatttcatcatagttacgattttatcatcttctatagttggtgtaatagcgcatacctttttctccaagactggaaccaacgtcataaaaatgtttaaatcaaaatccatatcaacatctgatgcgctaagaccagtctcgcgttcaagattatctttactaatggtgacgaactcatcgtatagaactctaagtttgtccattatttatttacagatttagttgtttaatttatttgtgctcttccagagttgggatagtatttttctaacgtcggtattatattattaggatctacgttcatatgtatcataatattaatcatccacgttttgataaatctatctttagcttctgaaataacgtatttaaacaaaggagaaaaatatttagctacggcatcagacgcaataacattttttgtaaatgtaacgtatttagacgacagatcttcgttaaaaagttttccatctatgtagaatccatcagttgttaacaccattcccgcgtcagattgaataggagtttgaatagtttgttttggaaatagatccttcaataacttatagttgggtgggaaaaaatcgattttatcactagactctttcttttttactatcattacctcatgaactatttcttgaatgagtatatgtattttctttcctatatcggacgcgttcattggaaaatataccatgtcgttaactataagaatatttttatcctcgtttacaaactgaataatatcagatgtagttcgtaaacgaactatatcatcaccagcacaacatctaactatatgatatccactagtttcctttagtcgtttattatcttgttccatattagcagtcattccatcatttaagaaggcgtcaaagataatagggagaaatgacattttggattctgttacaactttaccaaaattaaggatatacggacttactatctttttctcaacgtcaatttgatgaacacacgatgaaaatgtacttcgatgagattgatcatgtagaaaacaacaagggatacaatatttccgcatatcatgaaatatattaagaaatcccaccttattatatttccccaaaggatccatgcacgtaaacattatgccgttatcattaataaagacttctttctcatcggatctgtaaaagttgttactgatttttttcattccaggatctagataattaataatgatgggttttctattcttattctttgtattttggcatatcctagaccagtaaacagtttccactttggtaaaatcagcagacttttgaacgctattaaacatggcattaatggcaataactaaaaatgtaaaatatttttctatgttaggaatatggtttttcactttaatagatatatggtttttggccaaaatgatagatatttttttatccgaggatagtaaaatattattagtcgccgtctctataaaaatgaagctagtctcgatatccaattttattctagaattgataggagtcgccaaatgtaccttatacgttatatctcccttgatgcgttccatttgtgtatctatatcggacacaagatctgtaaatagttttacgttattaatcatcacggtatcgccgtcgctagataatgctaatgtaccatccaagtcccaaatggagagatttaactgttcatcgtttagaataaaatgattaccggtcatattaataaagtgttcatcgtatctagataacaacgacttataattaatgtccaagtcttgaactcgctgaatgatcttttttaacccagttagttttagattggtacgaaatatattgttaaactttgattctacagtaatgtccaaatctagttgtggaaatacttccatcaacattgtttcaaacttgataatattattatctacatcttcatacgatccaaattccggaatagatgtatcacatgctcttgccacccagataaccaaaaagtcacacgctccaggatatacattgtataaaaagctatcgtttttaagtagggtttttttctgcgtgtatacgaagggattaaaaatagtattatcaacgtaactatattccaaattattcttatgagaatagataataatatcgtccttaatatctaacaaatttcctaaatatccctttaattgagtcattcgaagcgtcaatagaatatgtctcttaactatttccggctgttgtatatttaaatgacttcgtaaaaaataatatatgggcgacttctcatctatgtaatcatatggagtgagatatagggctcgttctacctcctgccccttacccacctgtaataccaattgcggacttactatatatcgcatatttatatcgtggggtaaagtgaaaatctactaccgatgatgtaagtcttacaatgttcgaaccagtaccagatcttaatttggaggcctccgtagaactaggggaggtaaatatagatcaaacaacacctatgataaaggaaaatagcggttttatatcccgtagtagacgtctattcgcccatagatctaaggatgatgagagaaaactagcactacgattctttttacaaagactttattttttagatcatagagagattcattatttgttcagatgcgttgacgctgtaaaagacgtcactattaccaaaaaaaataacattatcgtggcgccttatatagcacttttaactatcgcatcaaaaggatgcaaacttacagaaacaatgattgaagcattctttccagaactatataatgaacatagtaagaaatttaaattcaactctcaagtatccatcatccaagaaaaactcggataccagtttggaaactatcacgtttatgattttgaaccgtattactctacagtagctctggctattcgagatgaacattcatctggcatttttaatatccgtcaagagagttatctggtaagttcattatctgaaataacatatagattttatctaattaatctaaaatctgatcttgttcaatggagtgctagtacgggcgctgtaattaatcaaatggtaaatactgtattgattacagtgtatgaaaagttacaactggtcatagaaaatgattcacaatttacatgttcattggctgtggaatcagaacttccaataaaattacttaaagatagaaatgaattatttacaaaattcatcaacgagttaaaaaagaccagttcattcaagataagcaaacgcgataaggatacgctactaaaatattttacttaggactggagttagaatttatagacgactcatttcgtttatcattattactaccatcattattagtattcttcttgttatcttgttcagaaatatacagcaatgctatgcctaatactaaatacattatcatgcttgcaatggctctaacaacgacgaaccaaaatgaatttggtcgtagcttttgttcacaaaaatacataaagaaatgtctacataaatctatggcgccattggctacttgaaatagcgccagtcctcctacagattttaatatagctgtataacatgacatttattcatcatcaaaagagacagagtcaccatctgtcatatttagattttttttcatgtgttcaaagtatcctctactcatttcattataatagtttatcatacttagaattttaggacggatcaatgagtaagacttgactagatcgtcagtagtaatttgtgcatcgtctattctgcatccgcttcgtcgaataatgtatagcatcgctttgagattctccatagctatcaagtctttatacaatgacatggaaatatctgtgaatactttatacttctccaacatcgatgccttaacatcatcgcctactttagcattgaaaatacgttctattgtgtagatggatgtagcaagatttttaaacaacaatgccatcttacacgatgattgcctcaagtctccaatcgtttgtttagaacgattagctacagagttcaacgcttggctgactagcatattattatctttagaaattgtattcttcaatgaagcgtttatcatatctgtgatttcgttagtcatattacagtctgactgggttgtaatgttatccaacatatcacctatggatacggtacacgtaccagcatttgtaataatcctatctaagatgttgtatggcattgcgcagaaaatatcttctcctgtaatatctccactctcgataaatctactcagattattcttaaatgccttattctctggagaaaagatatcagtgtccatcatttcattaatagtatacgcagaaaagataccacgagtatcaattctatccaagatacttatcggttccgagtcacagataatggtttcctctccttcgggagatcctgcatagaaatatctaggacaatagtttctatactgtctgtaactctgataatctctaaagtcactaactgataccatgaaattgagaagatcaaacgctgaagtaatcaatttttctgcctcgtttttactacaactagttttcatcaatgtagtgacgatgtattgtttagttactcttggtctaatactgatgatagagatattattacttcccataatggatcttctagtagtcaccttaaagcccattgatgcaaatagcagatagataaagtcttggtatgactcctttctaatatagtacggactacctttgtcacccaactttatacccacataagccataacaacctctttaatagccgtttcatgaggtttatcagccatgagcctgagtagttggaagaatctcatgaatcccgtctcagaaagtcctatatgcatgatagatttatctttcctgggaaactctcgtatagtcatagatgaaatactcttcaaagtttctgaaataagattagtaacagtcttacctccgactactctgggtaacaaacatactctaataggtgttttctctgcggagataatatcagaaaggatagagcaataagtagtattattgtgattataaagaccgaatacataacaggtagaatttataaacatcatgtcctgaaggtttttagacttgtattcctcgtaatccataccgtcccaaaacatggatttggtaactttgatagccgtagatctttgttccttcgccaacaggttaaagaaattaataaagaatttgttgtttctatttatgtccacaaattgcacgtttggaagcgtaactgttacgttcactgcagcattttgaggatcgcgagtatgaagtacgatgttattgtttactggtatatctggaaagaaatctaccagtctaggaataagagattgatatcgcatagaaatagtaaagtttataatctcatcatcgaagagcattttgttaccattgtaataaatatccactctgtcatatgtataaatgaagtactgttcaaacatgatgagatgtttatatgttggcatagtagtgagatcgacgtttggtaatggcaatgtattaagattaactccataatgtctagcagcatctgcgatgttataagtgtcgtcaaagcggggtcgatcttgtgctgttatatattgtctaacacctataagattatcaaaatcttgtctgcttaatacaccgttaacaatttttgccttgaattcttttattggtgcattaataacatccttatagaggatgttaaacaaataagtgttatcaaagttaagatctggatatttcttttctgctagaacatccattgagtcggagccatctggtttaatataaccaccgataaatctagctctgtattctgtatccgtcaatctaatattaagaaggtgttgagtgaaaggtggaagatcgtaaaagctgtgagtattaatgataggattagtttccgaactaatgttaattggggtattaataatatctatatttccagcgttaagtgtaacattaaacagttttaattcacgtgacgtggtatcaattaaataattaatgcccaatttggatatagcagcctgaagctcatcttgtttagttacggatcctaatgagttattaagcaatatatcgaacggatgaacgaaggttgttttaagttggtcacatactttgtaatctagacatagatgcggaagaacggtagaaactatacgaaataaatattcagagtcctctaattgatcaagagtaactattgacttaataggcatcatttatttagtattaaatgacgaccgtaccagtgacggatatacaaaacgatttaattacagagttttcagaagataattatccatctaacaaaaattatgaaataactcttcgtcaaatgtctattctaactcacgttaacaacgtggtagatagagaacataatgccgccgtagtgtcatctccagaggaaatatcctcacaacttaatgaagatctatttccagatgatgattcaccggccactattatcgaacgagtacaacctcatactactattattgacgatactccacctcctacttttcgtagagagttattaatatcggaacaacgtcaacaacgagaaaaaagatttaatattacagtatcgaaaaatgctgaagcaataatggaatctagatctatgataacttctatgccaacacaaacaccatccttgggagtagtttatgataaagataaaagaattcagatgttagaggatgaagtggttaatcttagaaatcaacgatctaatacaaaatcatctgataatttagataattttaccaaaatactatttggtaagactccgtataaatcaacagaagttaataagcgtatagccatcgttaattatgcaaatttgaacgggtcccccttatcagttgaggacttggatgtttgttcggaggatgaaatagatagaatctataaaacgattaaacaatatcacgaaagtagaaaacgaaaaattatcgtcactaacgtgattattattgtcataaacattatcgagcaggcattgctaaaactcggatttgaagaaatcaaaggactgagtaccgatatcacttcagaaattatcgatgtggagatcggagatgactgcgatgctgtagcatctaaactaggaatcggtaacagtccggttcttaatattgtattgtttatactcaagatattcgttaaacgaattaaaattatttaatttaatacattcccatatccagacaacaatcgtctggattaatctgttcctgtcgtctcataccggacgacatattaatctttttattagtaggcatctttttagatggtttctttttcccagcattaactgagtcgatacctagaagatcgtgattgatctctccgaccattccacgaacttctaattggccgtctctgacggtaccataaactattttaccagcattagtaacagcttggacaatctgaccatccattgcgttgaatgatgtagttgctgttgttctacgtttaggagcaccagaagtatttttggagcccttggaggctgatgtagaagaagacgaggattttgatttacatgtaatacattttgtactctttgattttgtatcacatgcgccggcagtcacatttgtttgagaattaagattattgttgcctcctttgacggctgcatctccaccgatttgcgctagtagatttttaagctgtggtgtaatcttattaactgtttcgatataatcatcgtaactgcttctaacggctaaattttttttatccgccatttagaagctaaaaatatttttatttatgcagaagatttaactagattatacaatgaactaatatgatccttttccagattatttacaaacttggtattttttggttctggaggaggcgaatttaaattcggacttggattcggattttgtgagttcttgatcttattatacatcgagtataggatggcgacggtaactgctacgcaaataccgatcaacaaaagaataccaatcatttattgacaataacttcactattgatcaagtatgcaatatatcatcttttcactaaataagtagtaataatgattcaacaatgtcgagatatatggacgataataatttagttcatggaaatatcgctatgattggtatgaatgactccgctaactctgtggggtgcgcagtgctttccccacatagaataaattagcattccgactgtgataataataccaagtataaacgccataatactcaatactttccatgtacgagtgggactggtagacttactaaagtcaataaaggcgaagatacacgaaagaatcaaaagaatgattccagcgattagcacgccggaaaaataatttccaatcataagcatcatgtccatttaactaataaaaattttaaatcgccgaatgaacaaagtggaatataaaccatataaaaacaatagtttgtactgcaaaaataatatctatttttgttttcgaagatatggtaaaattaaatagtagtacacagcatgttataactaacagcagcaacggctcgtaattacttatcatttactagacgaaaaggtggtgggatattttcttgctcaaataatacgaatatatcacccatccattttatgcgatgtttatatactctaatctttaatagatctatagacgacgggtttaccaacaatatagattttatcgattcatctaatttaaacccttccttaaacgtgaatgatctattatctggcataacgatgactctacctgatgaatcggacaatgtactgggccatgtagaataaattatcaacgaattatcgtctacgaacatttatatcatttgttttaattttaggacgcgaataaatggatataaaatagaaaataacagatattacaaccaatgttatggccgcgcccaaccaggtaggcagttttattttatcttttactacaggttctcctggatgtacgtcaccaacggcggacgtagttctagtacaattagacgtaagttctgcttgggaattttttaacgctaaagagttaacgttaatcgtgcacccaacgtatttacatctagttctttgaacatcttgattataatataaccattttctatctctagattcgtcggtgcactcatgtaaccaacataccctaggtcctaaatatttatctccggaattagattttggataattcgcgcaccaacaatttctatttcctttatgatcgttacaaaagacgtataatgccgtatccccaaaagtaaaataatcaggacgaataattctaataaactcagaacaatatctcgcatccatatgtttggagcaaatatcggaataagtagacatagccggtttccgttttgcacgtaaccattctaaacaattggggtttccaggatcgtttctacaaaatccagtcatgaaatcatcacaatgttctgtcttgtaattattattaaatatttttggacagtgtttggtatttgtcttagaacaacattttgccacgctatcactatcgcccaggagataatccttttttataaaatgacatcgttgcccggatgctatataatcagtggcgtgttttaaatccttaatatattcaggagttacctcgttctgataatagattaatgatccaggacgaaatttgaaagaactacatggttctccatgaattaatacatattgtttagcaaattcaggaactataaaactactacaatgatctatcgacataccatctatcaaacaaaacttgggtttaatttctcccggagatgtttcataatagtacgtataactttcttctgcaaacttaacagctctattatattcaggataattaaaacctaattccatatatttgtctcgtatatctgctattcctggtgctattttaattctattaagagtaacggctgcccccattcttaataatcgtcagtatttaaactgttaaatgttggtatatcaacatctaccttatttcccgcagtataaggtttgttgcaggtatactgttcaggaatggttacatttatacttcttctatagtcctgtctttcgatgttcatcacatatgcaaagaacagaataaacaaaataatgtaagaaataatattaaatatctgtgaattcgtaaatacattgattgccataataattacagcagctacaatacatacaatagacattcccacagtgttgccattacctccacgatacatttgagttactaagcaataggtaataactaagctagtaagaggcaatagaaaagatgagataaatatcatcaatatagagattagaggagggctatatagagccaagacgaacaaaatcaaaccgagtaacgttctaacatcattatttttgaagattcccaaataatcattcattcctccataatcgttttgcattatacctccatctttaggcataaacgattgctgctgttcctctgtaaataaatctttatcaagcactccagcacccgcagagaagtcgtcaagcatattgtaatatcttaaataactcatttatatattaaaaaatgtcactattaaagatggagtataatctttatgccgaactaaaaaaaatgacttgtggtcaacccctaagtctttttaacgaagacggggatttcgtagaagttgaaccgggatcatcctttaagtttctgatacctaagggattttacgcctctccttccgtaaagacgagtctagtattcgagacattaacaacgaccgataataaaatcactagtatcaatccaacaaatgcgccaaagttatatcctcttcaacgcaaagtcgtatctgaagtagtttctaatatgaggaaaatgatcgaatcaaaacgtcctctatacattactcttcacttggcgtgtggatttggtaagactattaccacgtgttatcttatggctacacacggtagaaaaaccgtcatttgcgtacccaataaaatgttaatacatcaatggaagacacaggtagaggcagtcggattggaacataagatatctatagatggagtaagtagtctattaaaggaactaaagactcaaagtccggatgtattaatagtagtcagtagacatctgacaaacgatgccttttgtaaatatatcaataagcattatgatttgttcatcttggatgaatcacatacgtataatctgatgaacaatacagcagttacaagatttttagcgtattatcctccgatgatgtgttattttttaactgctacacctagaccagctaaccgaatttattgtaacagtattattaatattgccaagttatccgatctaaaaaaaactatctatgcggtagatagtttttttgagccatattccacagacaatattagacatatggtaaaacgactagatggaccatctaataaatatcatatatatactgagaagttattatctgtagacgagcctagaaatcaacttattcttgataccctggtagaagaattcaagtcaggaactattaatcgaattttagttattactaaactacgtgaacatatggtattcttctacaaacgattattagattttttcggatcagaggttgtatttataggagacgcccaaaatagacgtactccagatatggtcaaatcaatcaaggaactaaatagatttatattcgtatccaccttattttattccggtactggtttagatattcctagtttggattcgttgttcatttgctcggcagtaatcaacaatatgcaaatagagcaattactagggagggtatgtcgagaaacagaactattagataggacggtatatgtatttcctaacacatccatcaaagaaataaagtacatgataggaaatttcatgcaacgaattattagtctgtctgtagataaactaggatttaaacaaaaaagttatcggaaacatcaagaatccgatcccacttctgtatgtacaacatcctccagagaagaacgtgtattaaatagaatatttaactcgcaaaatcgttaagaagtttaagcgacgatccgcatgctgcgcaggccagtgtattacccctcatagtattaatataatccaatgatacttttgtgatgtcggaaatcttaaccaatttagactgacaggcagaacacgtcatgcaatcatcatcgtcatcgataactgtagtcttgggcttctttttgcggctcttcattccggaacgcacattggtgctatccatttaggtagtaaaaaataagtcagaatatgccctatagcacgatcgtgcaaaacctggtatatcgtctctatctttatcacaatatagtgtatcgacatttttattattattgacctcgtttatcttggaacatggaatgggaacatttttgttatcaacggccatctttgccttaattccagatgttgtaaaattataactaaacagtctatcatcgacacaaatgaaattcttgtttagacgtttgtagtttacgtatgcggctcgttcgcgtctcattttttcagatattgcaggtactataatattaaaaataagaatgaaataacataggattaaaaataaagttatcatgacttctagcgctgatttaactaacttaaaagaattacttagtctgtacaaaagtttgaaattttcagattctgcggctatagaaaagtataattctttggtagaatggggaacatctacttactggaaaataggcgtgcaaaaggtagctaatgtcgagacgtcaatatctgattattatgatgaggtaaaaaataaaccgtttaatattgatccgggatattacattttcttaccggtatattttggaagcgtctttatttattcgaagggtaaaaatatggtagaacttggatctggaaactcttttcaaataccagatgatatgcgaagtgcgtgtaacaaagtattagacagcgataacggaatagactttctgagatttgttttgttaaacaatagatggataatggaagatgctatatcaaaatatcagtctccagttaatatatttaaactagctagtgagtacggattaaacatacccaaatatttagaaattgaaatagaggaagacacattatttgacgacgagttatactctattatagaacgctctttcgatgataaatttccaaaaatatccatatcgtatattaagttgggagaacttagacggcaagttgtagactttttcaaattctcgttcatgtatattgagtccatcaaggtagatcgtataggagataatatttttattcctagcgttataacaaaatcaggaaaaaagatattagtaaaagatgtagaccatttaatacgatccaaggttagagaacatacatttgtaaaagtaaaaaagaaaaacacattttccattttatacgactatgatggaaacggaacagaaactagaggagaagtaataaaacgaattatagacactataggacgagactattatgttaacggaaagtatttctctaaggttggtagtgcaggcttaaagcaattgactaataaattagatattaatgagtgcgcaactgtcgatgagttagttgatgagattaataaatccggaactgtaaaacgaaaaataaaaaaccaatcagcatttgatttaagcagagaatgtttgggatatccagaagcggattttataacgttagttaataacatgcggttcaaaatagaaaattgtaaggttgtaaatttcaatattgaaaatactaattgtttaaataacccgagtattgaaactatatatggaaactttaaccagttcgtctcaatctttaatatcgtcaccgatgtcaaaaaaagattattcgagtgaaataatatgcgcctttgatataggtgcaaaaaatcctgccagaactgttttagaagtcaaggataactccgttagggtattggatatatcaaaattagactggagttctgattgggaaaggcgcatagctaaagatttgtcacaatatgaatacactacagttcttctagaacgtcagcctagaaggtcgccgtacgtcaaatttatctattttattaaaggctttttatatcatacatcggctgccaaagttatttgcgtctcgcctgtcatgtctggtaattcatatagagatcgaaaaaagagatcggtcgaagcatttcttgattggatggacacattcggattgcgagactccgttccggatagacgcaaattagacgatgtagcggatagtttcaatttggctatgagatacgtattagataaatggaatactaattatacaccttataataggtgtaaatctagaaattacataaaaaaaatgtaataacgttagtaacgccattatggataatctatttacctttctacatgaaatagaagatagatatgccagaactatttttaactttcatctaataagttgcgatgaaataggagatatatatggtcttatgaaagaacgcatttcctcagaggatatgtttgataatatagtgtataataaagatatacatcatgccattaagaaactagtgtattgcgacatccaacttactaaacacattattaatcagaatacgtatccggtatttaacgattcttcacaagtgaaatgttgtcattatttcgacataaactcagataatagcaatattagctctcgtacagtagagatatttgagagggaaaagtcatctcttgtatcatatattaaaactaccaataagaagagaaaggtcaattacggcgaaataaagaaaactgttcatggaggcactaatgcaaattacttttccggtaaaaagtctgacgagtatctgagtactacagttagatccaacattaatcaaccttggatcaaaaccatctctaagaggatgagagttgatatcattaatcactctatagtaacgcgtggaaaaagctctatattacaaactatagaaattatttttactaatagaacatgtgtgaaaatattcaaggattctactatgcacattattctatccaaggacaaggatgaaaaggggtgtatacacatgattgacaaattattctatgtctattataatttatttctgttgttcgaggatatcatccaaaacgagtactttaaagaagtagctaatgttgtaaaccacgtacttacggctacggcattagatgagaaattattcctaattaagaaaatggctgaacacgatgtttatggagttagcaatttcaaaatagggatgtttaacctgacatttattaagtcgttggatcataccgttttcccctctctgttagatgaggatagcaaaataaagttttttaaggggaaaaagctcaatattgtagcattacgatctctggaggattgtataaattacgtgactaaatccgagaatatgatagaaatgatgaaggaaagatcgactattttaaatagcatagatatagaaacggaatcggtagatcgtctaaaagaattgcttctaaaatgaaaaaaaacactgattcagaaatggatcaacgactcggatataagtttttggtgcctgatcctaaagccggagttttttatagaccgttacatttccaatatgtatcgtattctaattttatattgcatcgattgcatgaaatcttgaccgtcaagcggccactcttatcgtttaagaataatacagaacgaattatgatagaaattagcaatgttaaagtgactcctccagattactcacctataatcgcgagtattaaaggtaagagttatgacgcattagccacgttcactgtaaatatctttaaagaggtaatgaccaaagagggtatatccatcactaaaataagtagttatgagggaaaagattctcatttgataaaaattccgctactaataggatacgggaataaaaatccacttgatacagccaagtatcttgttcctaatgtcataggtggagtctttatcaataaacaatctgtcgaaaaagtaggaattaatctagtagaaaagattacaacatggccaaaatttagggttgttaagccaaactcattcactttctcgttttcctccgtatcccctcctaatgtattaccgacaagatatcgccattacaagatatctctggatatatcacaattggaagcgtcgaatatatcatcgacaaagacatttataacggtcaatattgttttgctgtctcaatatttatctagagtgagtctagaattcattagacgtagcttatcatacgatatgcctccagaagttgtctatctagtaaacgcgataatagatagtgctaaacgaattactgaatctattactgactttaatattgatacatacattaatgacctggtggaagctgaacacattaaacaaaaatctcagttaacgatcaacgagttcaaatatgaaatgctgcataactttttacctcatatgaactatacacccgatcaactaaagggattttatatgatatctttactaagaaagtttctctactgtatctaccacacttctagatatccagatagagattcgatggtttgtcatcgtatactaacatacggcaaatattttgagacgttggcacatgatgaattagagaattacataggcaacatccgaaacgatatcatgaacaatcacaagaacagaggcacttacgcggtaaacattcatgtactaacaactcctggacttaatcatgcattttctagtctattgagtggaaagttcaaaaagtcagacggtagttatcgaacacatcctcactattcatggatgcagaatatttctattcctaggagtgttggattttatccggatcaagtaaagatttcaaagatgttttctgtcagaaaataccatccaagtcaatatctttacttttgttcatcagacgttccggaaagaggtcctcaggtaggtttagtatctcaattgtctgtcttgagttccattacaaatatactaacgtctgagtatttggatttggaaaagaaaatttgtgagtatatcagatcatattataaagatgatataagttactttgaaacaggatttccaatcactatagaaaatgctctagtcgcatctcttaatccaaatatgatatgtgattttgtaactgactttagacgtagaaaacggatgggattcttcggtaacttggaggtaggtattactttagttagggatcacatgaatgaaattcgcattaatattggagcgggaagattagtcagaccattcttggttgtggataacggagagctcatgatggatgtgtgtccggagttagaaagcagattagacgacatgacattctctgacattcagaaagagtttccgcatgtcatcgaaatggtagatatagaacaatttacttttagtaacgtatgtgaatcggttcaaaaatttagaatgatgtcaaaggatgaaagaaagcaatacgatttatgtgactttcctgccgaatttagagatggatatgtggcatcttcattagtgggaatcaatcacaattctggacccagagctattcttggatgtgctcaagctaaacaagctatctcttgtctgagctcggatatacgaaataaaatagacaatggaattcatttgatgtatccagagaggccaatcgtgattagtaaggctttagaaacttcaaagattgcggctaattgcttcggccaacatgttactatagcattaatgtcgtacaaaggtatcaatcaagaggatggaattatcatcaaaaaacaatttattcagagaggcggtctcgatattgttacagccaagaaacatcaagtagaaattccattggaaaactttaataacaaagaaagagataggtctaacgcctattcaaaattagaaagtaatggattagttagactgaatgctttcttggaatccggagacgctatggcacgaaatatctcatcaagaactcttgaagatgattttgctagagataatcagattagcttcgatgtttccgagaaatataccgatatgtacaaatctcgcgttgaacgagtacaagtagaacttactgacaaagttaaggtacgagtattaaccatgaaagaaagaagacccattctaggagacaaatttaccactagaacgagtcaaaagggaacagtcgcgtatgtcgcggatgaaacggaacttccatacgacgaaaatggtatcacaccagatgtcattattaattctacatccatcttctctagaaaaactatatctatgttgatagaggttattttaacagccgcatattctgctaagccgtacaacaataagggagaaaaccgacctgtctgttttcctagtagtaacgaaacatccatcgatacatatatgcaattcgctaaacaatgttatgagcattcaaatccgaaattgtctgatgaagaattatcggataaaatcttttgtgaaaagattctctatgatcctgaaacggataagccttatgcatccaaagtattttttggaccaatttattacttgcgtctgagacatttaactcaggacaaggcaaccgttagatgtagaggtaaaaagacgaagctcattagacaggcgaatgagggacgaaaacgtggaggaggtatcaagttcggagaaatggagagagactgtttaatagcgcatggtgcagccaatactattacagaagttttgaaagattcggaagaagattatcaagatgtgtatgtttgtgaaaattgtggagacatagcagcacaaatcaagggtattaatacatgtcttagatgttcaaaacttaatctctctcctctcttaacaaaaattgataccacacacgtatctaaagtatttcttactcaaatgaacgccagaggcgtaaaagtcaaattagatttcgaacgaagacctccttcgttttataaaccattagataaagttgatctcaaaccgtcttttctggtctaatattgtttagtagatacttatcaacatcatcaagattatcaagattatcaagattatcaagataagctaattcactaaacacattatcgatttcggtatcgttactcgcagaataaagttcgttatgatcctgatattcggaaatctgtggagtttcaggttttggtggatgtgtaacagctacttgagataccgaagtctgatattcagaaagctgtggatgttctggttcggcatccaccgatggtgttacaccactactaattggttcagtaacgtctgtggacgatggaggcaccacttctacaggttctggttctttatcctcagtcatcaacggagctacttcaatgcgaggaaatgtataatttggtaatggtttctcatgtggatctgaagaagaggtaagatatctactagaaagataccgatcacgttctagttctcttttgtagaacttaactttttctttctcagcatctagttgatattccaacctcttcacgttactacgttcagatttcaattcacgttcgcatgggttacctccgcagtttttacgagcgatttcacgttcagccttcatgcgtctctccctctctctatcgagtttatcagagcagtctttctgaaggcgatcgaactccataaatttctccaacgctttgattgtttccatagatttccgaagttcagcttttaggactgtgattctttttctttcgaattcacagctggatgtacaaccgtttccattaccgccatctctaagtttcttttctagatcggcaacatttcatccccatgccttttacattcctcgagtctactgtcgtcgaaatatcgttccagctccttttcgacatcaataactttagcacgttgtctctcaagctctcttttgtagttatctgattccctggcacgtttaagatcttcatgcaattgagtcagctcttaacacaatctcttgcttcttcgtcatagtacgcgcaatcactgtgagatccattgttaccacgtctacactcggcgagctcgcgtttaagagattcaatttcccgtttgtattggtccatgtttccattgctaccaccattagatttacaggctgctagttgtcgttcgagatcagaaatacgggttttcttggaattgatttcgtcgatgtacttggcatcgaaacacttattaagttctttttccaattctacgattttatttctttcgcgagtcaattccctcctgtagtaactatctgttttgtcagattcacgctctctacgtagactttcttgcaagttactaatttgttccctagcacgtccgagtttagttttatatgctgaatagagttctgattcatcctttgagcagatctctagcgatcgtttaagattcctgattctagtctttagcctatttacctcctcagaagatgttccgttaccgttgcgtttacactcgttaagctgtctatcaagatccatgattctatctctaagacgttgcatctctctttccatatcagcattgctttcattattacgtctgcagtcactcaactgtctttcaatatctgagattctatctctaagacgtcgcatctctctctgtttcggcattggtttcattattacgtctacagtcgttcaactgtctttcaagatctgatattctagattggagtctgctaatctctgtagcattttcacggcattcactcagttgtctttcaagatctgaaattttagattggagtctgctaatctctgtaagatttcctcctccgctctcgatgcagtcggtcaacttattctctagttctctaatacgcgaacgcagtgcatcaacttcttgcgtgtcttcctggttgcgtgtacattcatcgagtctagattcgagatctctaacgcgtcgtcgttcttcctcaagttctctgcgtactacagaaagcgtgtccctatcttgttgatatttagcaatttctgattctagagtactgattttgcttacgtagttactaatatttgtcttggccttatcaagatcctccttgtatttgtcgcattccttgatatccctacgaagtctggacagttcccattcgacattacgacgtttatcgatttcagctcggagatcgtcatcgcgttgttttagccacatacgactgagttcaagttctcgttgacaagatccatctacttttccattcctaatagtatccagttccttttctagttctgaacgcatttctcgttccctatcaagcgattctctcaattctcggatagtcttcttatcaatttctaataaatctgaaccatcatctgtcccattttgaatatccctgtgttctttgatctcttttgtaagtcggtcgattctttcggttttataaacagaatccctttccaaagtcctaatcttactgagtttatcactaagttctgcattcaattcggtgagttttctcttggcttcttccaactctgttttaaactctccactatttccgcattcttcctcgcatttatctaaccattcaattagtttattaataactagttggtaatcagcgattcctatagccgttcttgtaattgtgggaacataattaggatcttctaatggattgtatggcttgatagcatcatctttatcattattagggggatggacaaccttaattggttggtcctcatctcctccagtagcgtgtggttcttcaatagccgtgttagtaataggcttaggcaaatgcttgtcgtacgcgggcacttcctcatccatcaagtatttataatcgggttctacgtctgaatattcttttctaagagacgcaacttctggagttagtagaagaactctgtttctatatctatcaacgctggaatcaatactcaagttaaggatagcgaatacctcatcgtcatcatccgtatcctctgaaacgccatcatatgacatttcatgaagtctaacgtattgataaacagaatcagatttagtattaaacagatccttaacctttttagtaaatgcatatgtatattttagatctccagatttcataatatggtcgcatgccttaaatgtcagtgcttccataatatagtctggaacactaattggtgatgaaaaagataccggaccatatgctacgttgataaataactctgagccactaactagataatgattaatgttaaggaagaggaaatattcagtgtataggtatgtcttggcgtcatatcttgtactaaacacgctaaacagtttgttaatgtgatcaatttccaatagattaattagagcagcaggaataccaacaaacatattaccacatccgtattttctatgaatatcacatatcatgttaaaaaatcttgatagaagagcgaatatctcgtctgacttaatgagtcgtagttcagcagcaacataagtcataactgtaaatagaacatactttcctgtagtgttgattctagactccacatcaacaccattattaaaaatagttttatatacatctttaatctgctctccgttaatcgtcgaacgttctagtatacggaaacactttgatttcttatctgtagttaatgacttagtgatatcacgaagaatattacgaattacatttcttgtttttcttgagagacctgattcagaactcaactcatcgttccatagtttttttacctcagtggcgaaatctttggagtgcttggtacatttttcaataaggttcgtgacctccatttattataaaaaaattttattcaaaacttaactacaatcgggtaattataaaatcgtagatctcccatgtggtggaatactaccatctatcgcatgtggatggacagtaggtaatggccatgggaacagtaatgtttgcatatttatctttcttgccagtattactgcatattgtcccaatgtttcgatgtgatgttctaacctatcaactgccgctgtatcacaacaatagtgtccgatgaaattaagattatgatccaatgtgtttaatatatgattatcaagtcttatacgatccgcgtcttttttgacaggatcaggttcttctacaggaagaagtttcggcctcttatgatattcatgtctgggaaacggtggtctagggtgaggctccggtatcggagtgggttttggattataatcatcatcgtctatgacatcatcttcgacttcgatatttattttgctatcttgatgatgtcctgtatcagttgcattttcagcactcgactgaatattagcgcattcattgtttattattaccatatttctaaacccaaaatgtatatgttgaacatcagtactatcgttgatgagtcttatagcatgaattcgcttatcgttatcgggtttagcttctgtcaccttagcaattccttttttattaaactctacataatcatatccatttctattgtttgttctaatataaacgagtatagcatcattgctaaatttttcaatagtatcgaaaacagaatatcctaaaccatataatatatattcaggaacactcaaactaaatgtccaggattctcctaaatacgtaaactttaatagtgcgaaatcattcaaaaatctaccacttatagatagatagtacataaatgcgtatagtagtctacctatctctttattatgaaaaccggcattacgatcatatatgtcgtgatatacctgtgatccgtttacgttaaaccataaatacatgggtgatcctataaacatgaatttatttctaattctcagagctatagttaattgaccgtgtaatatttgcttacatgcatacttgatacgctcattaataagatttttatcattgctcgttatctcagaatcgtatatataaggagtaccatcgtgattcttaccagatattatacaaaatactatatataaaatatattgaccaacgttagtaatcatataaatgtttaacgttttaaattttgtattcaatgatccattatcatacgctagcatggtcttatgatattcattctttaaaatataatattgtgttagccattgcattggggctcctaatggagattttttattctcatccattttaggataggctttcataaagtccctaataacttcgtgaataatgtttctatgttttctactgatgcatgtatttgcttcgatttttttatcccatgtttcatctatcatagatttaaacgcagtaatgctcgcaacattaacatcttgaaccgttggtacaattccgttccataaatttataatgttcgccatttatataactcattttttgaatatacttttaattaacaaaagagttaagttactcatatggacgccgtccagtctgaacatcaatctttttagccagagatatcatagccgctcttagagtttcagcgtgattttccaacctaaatagaacttcatcgttgcgtttacaacacttttctatttgttcaaactttgttgttacattagtaatctttttttccaaattagttagccgttgtttgagagtttcctcattgtcgtcttcatcggctttaacaattgcttcgcgtttagcctctggctttttagcagcctttgtagaaaaaaattcagttgctggaattgcaagatcgtcatctccggggaaaagagttccgtccatttaaagtacagattttagaaactgacactctgcgttatttatatttggtacaacacatggattataaatattgatgttaataacatcagaaaatgtaaagtctatacattgttgcatcgtgttaaattttctaatggatctagtattattgggtccaacttctgcctgaaatccaaatatggaagcggatacaaaaccgtttcctggataaaccacacatctccacttttgctttacatcagaaattgtgtcattgacatcttgaactctcctatctaatgccggtgttccacctatagattttgaatattcgaatgctgcatgagtagcattaaattccttaatattgccataattttcatatattgagtaaccctggataaaaagtaaacacaccgcagccgtcgctaccacaataaaaaaaattgatagagagttcatttataatctattagaagctgacaaaatttttttacacgcatcagacaatgctttaataaatagttcaacatctacttttgtcatatcgaaccgatggtatgattctaacctagaattacatccgaaaaagttgactatgttcatagtcattaagtcattaacaaacaacattccagactctggattataagacgatactgtttcgtcacaattacctaccttaatcatgtgattatgaatattggctattagagcaccttctaagaaatctataatatctttgaaacacgatttaaaatcaaaccacgaatatacttctacgaagaaagttagtttacccataggagaaataactataaatggagatctaaatacaaaatccggatctatgatagttttaacattattatattctctattaaatacctccacatctaaaaatgttaattttgaaactatgtcttcgtttattaccgtacctgaactaaacgctataagctctattgtttgagaactctttaaacgatattcttgaaatacatgtaacaaagtttcctttaactcggtcggtttatctaccatagttacagaatttgtatccttatctataatataataatcaaaatcgtataaagttatataattatcgcgttcagattgtgatcttttcaaatagactaaaaaccccatttctctagtaagtatcttatgtatatgtttgtaaaatatcttcatggtgggaatatgctctaccgcagttagccattcctcattgacagcggtagatgtattagacaaaactattccaatgtttaacaagggccattttacgagattattaaatccttgtttgataaatgtagccaatgagggttcgagttcaacgacgattgaattctcttcccgcggatgctgcatgatgaacgacgggatgttgttcgattgatttggaattctttttcgactttttgtttatattaaatattttaaaatttatagctgatagcaattcatgtactacggataatgtagacgcgtattgcgcatcgatatctttattattagataaatttatcaataaatgtgagaagtttgcctcgttaaggtcttccatttaaatattatataaacatttgtgtttgtatcttattcgtcttttatggaatagttttttactagtaaagctgcaattacacactttgtccgtaaaacataaatataaacaccagcttttatcaatcgttccaaaaagtcgacggcggacatttttaacatggcatctattttaaatacacttaggtttttggaaaaaacatcattttataattgtaacgattcaataactaaagaaaagattaagattaaacataagggaatgtcatttgtattttataagccaaagcattctaccgttgttaaatacttgtctggaggaggtatatatcatgatgatttggttgtattggggaaggtaacaattaatgatctaaagatgatgctattttacatggatttatcatatcatggagtgacaagtagtggagcaatttacaaattgggatcgtctatcgatagactttctctaaataggactattgttacaaaagttaataattatgatgatacattttttgacgacgatgattgatcgctattgcacaattttgtttttttactttctaatatagcgtttagattctttttcatgtgcgaatattgatttactaaaatatcgatgtttaacttttgttctatgacgtccttatcagcggtatcggtacatatacgtaattcaccttcacaaaatacggagtcttcgataataatagccaatcgattattggatctagcggtctgtatcatattcaacatgtttaatatatcctttcgtttcccctttacaggcatcgatcgtagcatattttccgcgtctgagatggaaatgttaaaactacaaaaatgcgtaatgttagcccgtcctaatattggtacgtgtctataagtttggcatagtagaataatagacgtgtttaaatgccttccaaagtttaagaattctattagagtattgcattttgatagtttatcgcctacatcatcaaaaataagtaaaaagtgtgctgattttttatgattttgtgcgacagcaatacatttttctatgttacttttagttcgtatcagattatattctagagattcctgactactaacgaaattaatatgatttggccaaatgtatccatcataatctggattataaacgggtgtaaacaagaatatatgtttatattttttaactagtgtagaaaacagagatagtaaatagatagtttttccagatccagatcctcccgttaaaaccattctaaacggcatttttaataaattttctcttgaaaattgtttttcttggaaacaattcataattatatttacagttactaaattaatttgataataaatcaaaatatggaaaactaaggtcgttagtagggaggagaacaaagaaggcatatcgtgatataaataacatttattatcatgatgacaccagaaaacgacgaagagcagacatctgtgttctccgctactgtttacggagacaaaattcagggaaagaataaacgcaaacgcgtgattggtctatgtattagaatatctatggttatttcactactatctatgattaccatgtccgcgtttctcatagtgcgcctaaatcaatgcatgtctgctaacgaggctgctattactgacgccgctgttgccgttgctgctgcatcatctactcatagaaaggttgcgtctagcactacgcaatatgatcacaaagaaagctgtaatggtttatattaccagggttcttgttatatattacattcagactaccagttattctcggatgctaaagcaaattgcactgcggaatcatcaacactacccaataaatccgatgtcttgattacctggctcattgattatgttgaggatacatggggatctgatggtaatccaattacaaaaactacatccgattatcaagattctgatatatcacaagaagttagaaagtatttttgtgttaaaacaatgaactaatatttatttttgtacattaataaatgaaatcgcttaatagacaaactgtaagtaggtttaagaagttgtcggtgccggccgctataatgatgatactctcaaccattattagtggcataggaacatttctgcattacaaagaagaactgatgcctagtgcttgcgccaatggatggatacaatacgataaacattgttatctagataccaacattaaaatgtctacagataatgcggtttatcagtgtcgtaaattacgagctagattgcctagacctgatactagacatctgagagtattgtttagtattttttataaagattattgggtaagtttaaaaaagaccaataataaatggttagatattaataatgataaagatatagatattagtaaattaacaaattttaaacaactaaacagtacgacggatgctgaagcgtgttatatatacaagtctggaaaactggttgaaacagtatgtaaaagtactcaatctgtactatgtgttaaaaaattctacaagtgacaacaaaaaatgaattaataataagtcgttaacgtacgccgccatggacgccgcgtttgttattactccaatgggtgttgactataacagatacattgtatgatgatctcgatatctcaatcatggactttataggaccatacattataggtaacataaaaactgtccaaatagatgtacgggatataaaatattccgacatgcaaaaatgctactttagctataagggtaaaatagttcctcaggattctaatgatttggctagattcaacatttatagcatttgtgccgcatacagatcaaaaaataccatcatcatagcatgcgactatgatatcatgttagatatagaagataaacatcagccattttatctattcccatctattgatgtttttaacgctacaatcatagaagcgtataacctgtatacagctggagattatcatctaatcatcaatccttcagataatctgaaaatgaaattgtcgtttaattcttcattctgcatatcagacggcaatggatggatcataattgatgggaaatgcaatagtaattttttatcataaaagttgtaaagtaaataataaaacaataaatattgaactagtagtacgtatattgagcaatcagaaatgatgctggtacctcttatcacggtgaccgtagttgcgggaacaatattagtatgttatatattatatatttgtaggaaaaagatacgtactgtctataatgacaataaaattatcatgacaaaattaaaaaagataaagagttctaattccagcaaatctagtaaatcaactgatagcgaatcagactgggaggatcactgtagtgctatggaacaaaacaatgacgtagataatatttctaggaatgagatattggacgatgatagcttcgctggtagtttaatatgggataacgaatccaatgttatggcgcctagcacagaacacatttacgatagtgttgctggaagcacgctgctaataaataatgatcgtaatgaacagactatttatcagaacactacagtagtaattaatgaaacggagactgttaaagtacttaatgaagataccaaacagaatcctaactattcatccaatcctttcgtaaattataataaaaccagtatttgtagcaagtcaaatccgtttattacagaacttaacaataaatttagtgagaataatccgtttagacgagcacatagcgatgattatcttaataagcaagaacaagatcatgaacacgatgatatagaatcatcggtcgtatcattggtgtgattagtttcctttttataaaattgaagtaatatttagtattattgctgccgtcacgttgtacaaatggagatattccctgtattcggcatttctaaaattagcaattttattgctaataatgactgtagatattatatagatacagaacatcaaaaaattatatctgatgagatcaatagacagatggatgaaacggtacttcttaccaacatcttaagcgtagaagttgtaaatgacaatgagatgtaccatcttattcctcatagattatcgacgattatactctgtattagttctgtcggaggatgtgttatctctatagataatgacgtcaatggcaaaaatattctaacctttcccattgatcatgctgtaatcatatccccactgagtaaatgtgtcgtagttagcaagggccctacaaccatactggttgctaaagcggatatacccagcaaacgattggtaacatcgtttacaaacgacatactgtatgtaaacaatctatcactgattaattatttgccgttgtctgtattcattattagacgagtcaccgactatttggatagacacatatgcgatcagatatttgctaataataagtggtattcccttataaccatcgacgataagcaatatcctattccatcaaattgtataggtatgtcttctgccaagtacataaattctagcatcgagcaagatactttaatacatgtttgtaacctcgagcatccattcgacttagtatacaaaaaaatgcagtcgtacaattctgtacctatcaaggaacaaatattgtacggtagaattgataatataaatatgagcattagtatttctgtggattaatagatttctagtatggggatcattaatcatctctaatctctaaatacctcataaaacgaaaaaaaagctattatcaaatactgtacggaatagattcattctcttctctttttatgaaactctgttgtatatctactgataaaactggaagcaaaaaatctgataaaaagaataagatcaagatcaaggattatatggaacacgattattataaaataacaatagttcctggttcctcttccacgtctactagctcgtggtattatacacatgcctagtaatagtctctttgcgttgatggaaagcagactagaaataacaggctaaaatgttcagacaccataatagttcccaacccagataataacagagtaccatcaacacattcctttaaactcaatcccaaacccaaaaccgttaaaatgtatccggccaattgatagtagataatgaggtgtacagcgcatgataatttacacagtaaccaaaatgaaaatactttagtaattataagaaatatagatggtaacgtcatcatcaacaatccaataatatgccggagagtaaacattgacggataaaacaaaaatgctccgcataactctatcatggcaataacacaaccaaatacttgtaagattcctaaattagtagaaaatacaacggatatcgatgtataagtgatctcgagaaataataagaataaagtaatgcccgtaaagataaacatcaacattgtttggtaatcattaaaccaattagtatgacgttgaactaatttcacagtaaattttattccagtattatccccgcatgtataagtacctggtaagatatctttatattccataatcaatgagacatcactatctgataacgaatgaagtctagcactagtatgccatttacttaatattgtcgtcttggaagttttattataagttaaaatatcatggttatccaatttccatctaatatactttgtcggattatctatagtacacggaataatgatggtatcattacatgctgtatactctatggtctttgtagttgttataacaaccaacgtatagaggtatatcaacgatattctaactcttgacattttttatttatttaaaatgatacctttgttatttattttattctattttgctaacggtattgaatggcataagtttgaaacgagtgaagaaataatttctacttacttattagacgacgtattatacacgggtgttaatggggcggtatacacattttcaaataataaactaaacaaaactggtttaactaataataattatataacaacatctataaaagtagaggatgcggataaggatacattagtatgcggaaccaataacggaaatcccaaatgttggaaaatagacggttcagacgacccaaaacatagaggtagaggatacgctccttatcaaaatagcaaagtaacgataatcagtcacaacggatgtgtactatctgacataaacatatcaaaagaaggaattaaacgatggagaagatttgacggaccatgtggttatgatttattcacggcggataacgtaattccaaaagatggtttacgaggagcattcgtcgataaagacggtacttatgacaaagtttacattcttttcactgatactatcggctcaaagagaattgttaaaattccgtatatagcacaaatgtgcctaaacgacgaaggtggtccatcatcgttgtctagtcatagatggtcgacgtttctcaaagtcgaattagaatgtgatatcgacggaagaagttatagataaattattcattctaaaactataaaaacagataatgatacgatactatatgtattcttcgatagtccgcattatgtacctattctatgaataccattaaacaatctttttctacgtcaaaattggaaggatatacaaagcaattgccgtctccagctcctggtatatgtctaccagctggaaaagttgttccacataccacgtttgaagtcatagaaaaatataatgtactagatgatattataaagcctttatctaaccaacctatcttcgaaggaccgtctggtgttaaatggttcgatataaaggagaaggaaaatgaacatcgggaatatagaatatacttcataaaagaaaattctatatattcgttcgatacaaaatctaaacaaactcgtagctcgcaagtcgatgcgcgactattttcagtaatggtaacttcgaaaccgttatttatagcagatatagggataggagtaggaatgccacaaatgaaaaaaatacttaaaatgtaatcttaatcgagtacaccacacgacaatgaacaaacataagacagattatgctggttatgcttgctgcgtaatatgcggtctaattgttggaattatttttacagcgacactattaaaagttgtagaacgtaaattagttcatacaccatcaatagataaaacgataaaagatgcatatattagagaagattgtcctactgactggataagctataataataaatgtatccatttatctactgatcgaaaaaacctgggaggaaggacgtaatgcatgcaaagctctaaatccaaattcggatctaattaagatagagactccaaacgagttaagttttttaagaagccttagacgaggctattgggtaggagaatccgaaatattaaaccagacaaccccatataattttatagctaaaaatgccacgaagaatggaactaaaaaacggaaatatatttgtagtacaacgaatactcccaaactgcattcgtgttacactatataacaattacactacatttttatcataacactacttcggttagatgttttagaaaaaaataaatatcgccgtaccgttcttgtttttataaaaataacaattaacaattatcaaattttttctttaatattttacgtggttgaccattcttggtggtaaaataatctcttagtgttggaatggaatgctgtttaatgtttccgcactcatcgtatattttgacgtatgcagtcacatcgtttacgcaatagtcagactgtagttctatcatgcttcctacatcagaaggaggaacagttttaaagtctcttggttttaatctattgccattagttttcatgaaatcctttgttttatccacttcacattttaaataaatgtccactatacattcttctgttaattttactagatcgtcatgggtcatagaatttataggttccgtagtccatggatccaaactagcaaacttcgcgtatacggtatcgcgattagtgtatacaccaactgtatgaaaattaagaaaacagtttaataaatcaacagaaatatttaatcctccgtttgatacagatgcgccatatttatggatttcggattcacacgttgtttgtctgaggtgttcgtctagtgttgcttctacgtaaacttcgattcccatatattctttattgtcagaatcgcataccgatttatcatcatacactgtttgaaaactaaatggtatacacatcaaaataataaataataacgagtacattctgcaatattgttatcgtaattggaaaattagtgttcgagtgagtcggattatgtgagtactggattgtatattttattttatattttgtaataagaataaaatgctaatgtcaagtttattccaatagatgtcttattaaaaaacatatataataaataacaatggctgaatggcataaaattatcgaggatatctcaaaaaataataagttcgaggatgccgccatcgttgattacaagactacaaagaatgttctagctgctattcctaacagaacatttgccaagattaatccgggtgaaattattcctctcatcactaatcgtaatattctaaaacctcttattggtcagaaatattgtattgtatatactaactctctaatggatgagaacacgtatgctatggagttgcttactgggtacgcccctgtatctccgatcgttatagcgagaactcataccgcacttatatttttgatgggtaagccaacaacatccagacgtgatgtgtatagaacgtgtagagatcacgctacccgtgtacgcgcaactggtaattaaaataaaaagtaatattcatatgtagtgtcaattttaaatgatgatgatgaaatggataatatccatattgacgatgtcaataatgccggtattggcatacagctcatcgatttttagatttcattcagaggatgtggaattatgttatgggcatttgtattttgataggatctataatgtagtaaatataaaatataatccgcatattccatatagatataattttattaatcgcacgttaaccgtagatgaactagacgataatgtcttttttacacatggttattttttaaaacacaaatatggttcacttaatcctagtttgattgtctcattatcaggaaacttaaaatataatgatatacaatgctcagtaaatgtatcgtgtctcattaaaaatttggcaacgagtacatctactatattaacatctaaacataagacttattctctacatcggtccacgtgtattactataataggatacgattctattatatggtataaagatataaatgacaagtataatgacatctatgattttactgcaatatgtatgctaatagcgtctacattgatagtgaccatatacgtgtttaaaaaaataaaaatgaactcttaattatgctatgctattagaaatggataaaatcaaaattacggttgattcaaaaattggtaatgttgttaccatatcgtataacttggaaaagataactattgatgttacacctaaaaagaaaaaagaaaaggatgtattattagcgcaatcagttgctgtcgaagaggcaaaagatgtcaaggtagaagaaaaaaatattatcgatattgaagatgacgatgatatggatgtagaaagcgcataatacgatctataaaaataagtatataataaatactttttatttacggtactcttgtagtggtgataccctactcaattatttttttaaaaaaatacttattctgattcttctagccatttccgtgttcgttcgaatgccacatcgacgttaaagataggggagtagttgaaatctagttctgcattgttggtacgcacctcaaatgtagtgttggatatcttcaacgtatagttgttgagtagtgatggttttctaaatagaattctcttcatatcattcttgcacgcgtacatttttagcatccatcttggaattctagatccttgttctattcccaatggtttcatcaatagaagattaaacatatcgtacgaacacgatggagagtaatcgtagcaaaagtaagcatttcctttaatcttagatcccggatactggatatattttgcagccaacacgtgcatccatgcagcatttcctacatatacccggctatgcaccgcgtcatcatcgactgtacgatacataatgttaccgtgttgcttacattgctcgtaaaagactttcgtcaatttgtctccttctccgtaaattccagtgggtcttaggcaacaagtatacaattttgctccattcatgattacggaattattggctttcataaccagttgctcggccatacgtttactttttgcgtatacatgtcctggtgatatatcataaagggtatgctcatggccgatgaatggatcaccgtgtttattgggtcctattgcttccatgctactagtatagatcaaatacttgattcctaggtccacacaagctgccaatatagtctgtgttccataatagtttactttcatgatttcattatcggtgtattttccaaatacatccactagagcagccgtatgaataatcagatttaccccatctagcgcttctctcaccttatcaaagtcgtttatatcacattgtatatagtttataaccttaactttcgaggttattggttgtggatcttctacaatatctatgactctgatttcttgaacatcatctgcactaattaacagttttactatatacctgcctagaaatccggcaccaccagtaaccgcgtacacggccattgctgccactcataatatcagactacttattctattttactaaataatggctgtttgtataatagaccacgataatatcagaggagttatttactttgaaccagtccatggaaaagataaagttttaggatcagttattggattaaaatccggaacgtatagtttgataattcatcgttacggagatattagtcaaggatgtgattccataggcagtccagaaatatttatcggtaacatctttgtaaacagatatggtgtagcatatgtttatttagatacagatgtaaatatatttacaattattggaaaggcgttatctatttcaaaaaatgatcagagattagcgtgtggagttattggtatttcttacataaatgaaaagataatacattttcttacaattaacgagaatggcgtttgatatatcagttaatgcgtctaaaacaataaatgcattagtttacttttctactcagcaaaataaattagtcatacgtaatgaagttaatgatacacactacactgtcgaatttgatagggacaaagtagttgacacgtttatttcatataatagacataatgacaccatagagataagaggggtgcttccagaggaaactaatattggttgcgcggttaatacgccggttagtatgacttacttgtataataagtatagttttaaactgattttagcagaatatataagacacagaaatactatatccggcaatatttattcggcattgatgacactagatgatttggctattaaacagtatggagacattgatctattatttaatgagaaacttaaagtagactccgattcgggactatttgactttgtcaactttgtaaaggatatgatatgttgtgattctagaatagtagtagctctatctagtctagtatctaaacattgggaattgacaaataaaaagtataggtgtatggcattagccgaacatatatctgatagtattccaatatctgagctatctagactacgatacaatctatgtaagtatctacgcggacacactgagagcatagaggatgaatttgattattttgaagacgatgattcgtctacatgttctgccgtaaccgacagggaaacggatgtataattttttttatagcgtgaaggatatgataaaaaatataattgttgtatttatcccattccaatcaccttatatgattctgtaaaaaaattatactgtaacacaataaaggagtcttatagatgtatagaggtcagatactggtttgataaactgtttattccacataagtatgtttgactttatggttagacccgcatactttaacaaatcactgaaaattggagttaggtattgacctctcagaatcagttgccgttctggaacattaaatgtattttttatgatatactccaacgcatttatgtgggcatacaacaagtcattactaatggagtattccaagagttttagttgtctagtatttaacaagagaagagatttcaacagactgtttatgaactcgaacgccgcctcattgtcgcttatattgatgatgtcgaattctcccaatatcatcactgatgagtagctcatcttgttatcgggatccaagttttctaaagatgtcattaaaccctcgatcatgaatggatttatcatcatcgtttttatgttggacatgagcttagtccgtttgtccacatctatagacgacgatttctgaattatttcatatatccctctctttaactccaggaacttgtcaggatggtctactttaatatgttctcgtctaagagatgaaaatctttggatggttgcacgcgacttttctttaaaggatgacgttgcccaagatcctctcttaaatgaatccatcttatccttggacaagatggacagtctattttccttagatggtttaatatttttgttacccatgatctataaaggtagacctaatcgtctcggatgaccatatatttattttcagttttattatacgcataaattgtaaaaaatatgttaggtttacaaaaatgtctcgtggggcattaatcgtttttgaaggattggacaaatctggaaaaacaacacaatgtatgaacatcatggaatctataccggcaaacacgataaaatatcttaactttcctcagagatccactgtcactggaaagatgatagatgactatctaactcgtaaaaaaacctataatgatcatatagttaatctattattttgtgcaaatagatgggagtttgcatcttttatacaagaacaactagaacagggaattactttaatagttgatagatacgcattttctggagtagcgtatgccgccgctaaaggcgcgtcaatgactctcagtaagagttatgaatctggattgcctaaacccgacttagttatattcttggaatctggtagcaaagaaattaatagaaacgtcggcgaggaaatttatgaagatgttacattccaacaaaaggtattacaagaatataaaaaaatgattgaagaaggagatattcattggcaaattatttcttctgaattcgaggaagatgtaaagaaggagttgattaagaatatagttatagaggctatacacacggttactggaccagtggggcaactgtggatgtaatagtgaaattacattttttataaatagatgttagtacagtgttataaatggatgaagcatattactctggcaacttggaatcagtactcggatacgtgtccgatatgcataccgaactcgcatcaatatctcaattagttattgccaagatagaaactatagataatgatatattaaacaaggacattgtaaattttatcatgtgtagatcaaacttggataatccatttatctctttcctagatactgtatatactattatagatcaagagatctatcagaccgaattgattaattcattagacgacaatgaaattatcgattgtatagttaacaagtttatgagcttttataaggataacctagaaaatatagtagatgctatcattactctaaaatatataatgaataatccagattttaaaactacgtatgccgaagtactcggttccagaatagccgatatagatattaaacaagtgatacgtaagaatatactacaattgtctaatgatatccgcgaacgatatttgtgaaaaatattaaaaaaaaatactttttttattaaatgacgtcgcttcgcgaatttagaaaattatgctgtgatatatatcacgcatcaggatataaagaaaaatctaaattaattagagactttataacagatagggatgataaatatttgatcattaagctattgcttcccggattagacgatagaatttataacatgaacgataaacaaattataaaattatatagtataatatttaaacaatctcaggaagatatgctacaagatttaggatacggatatataggagacactattaggactttcttcaaagagaacacagaaatccgtccacgagataaaagcattttaactttagaagaagtggatagttttttaactacgttatcatccgtaactaaagaatcgcatcaaataaaattattgactgatgtagcatctgtttgtacatgtaatgatttaaaatgtgtagtcatgcttattgataaagatctaaaaattaaagcgggccctcggtacgtacttaacgctattagtcctcatgcctatgatgtgtttagaaaatctaataacttgaaagagataatagaaaatgcatctaaacaaaatctagactctatatctatttctgttatgactccaattaatcccatgttagcggaatcgtgtgattctgtcaataaggcgtttaaaaaatttccatcaggaatgtttgcggaagtcaaatacgatggtgaaagagtacaagttcataaaaataataacgagtttgccttctttagtagaaacatgaaaccagtactctctcataaagtggattatctcaaagaatacataccgaaagcatttaaaaaagctacgtctatcgtattggattctgaaattgttcttgtagacgaacataatgtaccgctaccgtttggaagtttaggaatacacaaaaagaaagaatataaaaactctaacatgtgtttgttcgtgtttgactgtttgtactttgatggattcgatatgacggacattccattgtacgaacgaagatcttttctcaaagatgttatggttgaaatacccaatagaatagtattctcagagttgacgaatattagtaacgagtctcagttaactgacgtattggatgatgcactaacgagaaaattagaaggattggtcttaaaagatattaatggagtatacgaaccgggaaagagaagatggttaaaaataaagcgagactatttgaacgagggttccatggcagattctgccgatttagtagtactaggtgcctactatggtaaaggagcaaagggtggtatcatggcagtctttctaatgggttgttacgacgatgaatccggtaaatggaagacggttaccaagtgttcaggacacgatgataatacgttaagggagttgcaagaccaattaaagatgattaaaattaacaaggatcccaaaaaaattccagagtggttagtagttaataaaatctatattcccgattttgtagtagaggatccgaaacaatctcagatatgggaaatttcaggagcagagtttacatcttccaagtcccataccgcaaatggaatatccattagatttcctagatttactaggataagagaggataaaacgtggaaagaatctactcatctaaacgatttagtaaacttgactaaatcttaatagttacatacaaactgaaaattaaaataacaccatttagttggtggtcgccatggatggtgttattgtatactgtctaaacgcgttagtaaaacatggcgaggaaataaatcatataaaaaatgatttcatgattaaaccatgttgtgaaagagtttgtgaaaaagtcaagaacgttcacattggcggacaatctaaaaacaatacagtgattgcagatttgccatatatggataatgcggtatccgatgtatgcaattcactgtataaaaagaatgtatcaagaatatccagatttgctaatttgataaagatagatgacgatgacaagactcctactggtgtatataattattttaaacctaaagatgttattcctgttatcatatctataggaaaggataaagatgtctgtgaactattaatctcatcagacatatcgtgtgcatgcgtggagttaaattcatatcacgtagccattcttcccatgaatgtttccttttttaccaaaggaaatgcctcgttgattattctcctgtttgatttctctatcgatgcagcacctctcttaagaagtgtaaccgataataatgttattatatctagacaccagcgtctacatgacgagcttccgagttccaattggttcaagttttacataagtataaagtccgactattgttctatattatatatggttgttgatggatctgtgatgcatgcgatagctgataatagaactcacgcaattattagcaaaaatatattagacaatactacaattaacgatgagtgtagatgctgttattttgaaccacagattaggattcttgatagagatgagatgctcaatggatcatcgtgtgatatgaacagacattgtattatgatgaatttacctgatgtaggcgaatttggatctagtatgttggggaaatatgaacctgacatgattaagattgctctttcggtggctggtaatttaataagaaatcgagactacattcccgggagacgaggctatagctactacgtttacggtatagcctctagataatttttttaagcacgaaataaaaaacataattttaaaccaatctatttcatactattttgtgtgatcaccatggacataaagatagatattagtatttctggtgataaatttacggtgactactaggagggaaaatgaagaaagaaaaaaatatctacctctccaaaaagaaaaaactactgatgttatcaaacctgattatcttgagtacgatgacttgttagatagagatgagatgtttactattctagaggaatattttatgtacagaggtctattaggcctcagaataaaatatggacgactctttaacgaaattaaaaaattcgacaatgatgcggaagaacaattcggtactatagaagaactcaagcagaaacttagattaaattctgaagagggagcagataactttatagattatataaaggtacaaaaacaggatatcgtcaaacttactgtatacgattgcatatctatgataggattgtgtgcatgcgtggtagatgtttggagaaatgagaaactgttttctagatggaaatattgtttacgagcgattaaactgtttattaatgatcacatgcttgataagataaaatctatactgcagaatagactagtatatgtggaaatgtcatagaaagttaatgagagcaaaaatatataaggttgtattccatatttgttattttttctgtaatagttaaaaaaatacattcgatggtctatctatcagattattatgtgttataaggtactttttctcataataaactagagtatgagtaagatagtgtttttcaaaacatataaatctaaaattgatggatgagatatacagctattaatttcgaaaatatataaatctaaaattgatggataagatatacagctattaatttcgaaaatatattttaatctgataactttaaacatggatttttgatggtggtttaacgttttaaaaaaagattttgttattgtagtatatgataatattaaaagatggatataaagaatttgctgactgcatgtactattttttacattactacattggctacggcagatatacctactccgccaccaacgggtcatgtgacaagggagaatatcttgataagaggcataatcaatgttgtaatcggtgtccacctggagaatttgccaaggttagatgtaatggtaacgataacacaaaatgtgaacgctgcccacctcatacatataccacaatccccaattattctaatggatgtcatcaatgtagaaaatgcccaaccggatcatttgataaggtaaagtgtaccggaacacagaacagtaaatgttcgtgtcttcctggttggtattgcgctactgattcttcacagactgaagattgttgaaattgtgtaccaaaaaggagatgtccatgcggatactttggtggaatagatgaacaaggaaatcctatttgtaaatcgtgctgtattggtgaatattgcaactacctacgtaattatagacttgatccattttctccatgcaaactatctaaatgtaattaattatgattttgatgataatgttaccatacattatatcgctacttggttagtgtattattcagtatgaagacctattaataattacttatcttttgacgatcttgttataattataatataaaaacttatggcatagtaactcataattgctgacgcgataaattcgtaataatctgttttgttcaaatttttataaggaatctacaggcataaaaataaaaatataatttataatatactcttacagcgcgccatcatgaatagcagcagtaaattaattgctgttattaatggatttagaaatagtggacgattttgtgatattaatatagttattaatgatgaaaggataaacgctcacagactcatcctatctggagcctccgaatatttttccattctgttttccaataattttatcgattctaatgaatacgaagttaatctaagtcatttagattatcaaagtgttaacgatttgatcgattacatttatgggatacctttgagcctaactaacgataacgtgaaatatattctttcaaccgctgattttttacaaattggatctgccattactgagtgcgaaaaatacatacttaaaaatctttgttctagaaactgtatcgatttctacatatacgctgataaatataataacaagaaaatagaatcagcgtcgtttaacacaatattacgaaatattttgagactcatcaacgatgaaaactttaaatacttaacagaggaatcaatgataaaaattttaagcgatgatatgttaaatataaaaaatgaggattttgcaccactaattctcattaaatggttagagagtactcaacaatcatgcaccgtcgagttacttagatgcctcagaatatcattgctttccccacaagttataaaatcactttatagtcatcaactggttagttcaatctacgaatgtataacattcttaaacaatatagcattcttggatgaatcatttcctagataccatagcatcgagttgatatctatcggtataagtaattcgcatgataagatttccataaactgctacaatcataaaaaaaatacatgggaaatgatatcttcacgtagatataggtgtagtttcgcagtggccgtcctggataatattatctatatgatgggtggatatgatcagtccccgtatagaagttcaaaggttatagcgtacaatacatgtacaaattcttggatatatgatataccagagctaaaatatcctcgttctaattgtgggggactggctgatgacgaatacatttattgtataggcggcatacgcgatcaggattcatcgttgacatctagtattgatagatggaagccatcaaaaccatattggcagaagtatgctaaaatgcgcgaaccaaaatgtgatatgggggttgcgatgttaaacggattaatatatgtcatgggtggaatcgttaaaggtgacacgtgtaccgacgcactagagagtttatcagaagatggatggatgaagcatcaacgtcttccaataaaaatgtccaatatgtcgacgattgttcatgatggcaagatttatatatctggaggttacaacaatagtagtgtagttaatgtaatatcgaatctagtccttagctataatccgatatatgatgaatggaccaaattatcatcattaaacattcctagaattaatcccgctctatggtcagcgcataataaattatatgtaggaggaggaatatctgatgatgttcgaactaatacatctgaaacatacgataaagaaaaagattgttggacattggataatggtcacgtgttaccacgcaattatataatgtataaatgcgaaccgattaaacataaatatccattggaaaaaacacagtacacgaatgattttctaaagtatttggaaagttttataggtagttgatagaacaaaatacataattttgtaaaaataaatcactttttatactaatatgacacgattaccaatacttttgttactaatatcattagtatacgctacaccttttcctcagacatctaaaaaaataggtgatgatgcaactctatcatgtaatcgaaataatacaaatgactacgttgttatgagtgcttggtataaggagcccaattccattattcttttagctgctaaaagcgacgtcttgtattttgataattataccaaggataaaatatcttacgactctccatacgatgatctagttacaactatcacaattaaatcattgactgctagagatgccggtacttatgtatgtgcattctttatgacatcaactacaaatgacactgataaagtagattatgaagaatactccacagagttgattgtaaatacagatagtgaatcgactatagacataatactatctggatctacacattcaccagaaactagttctgagaaaccagaggatatagataattttaattgctcgtcggtattcgaaatcgcgactccggaaccaattactgataatgtagaagatcatacagacaccgtcacatacactagtgatagcattaatacagtaagtgcatcatctggagaatccacaacagacgagactccggaaccaattactgataaagaagaagatcatacagtcacagacactgtctcatacactacagtaagtacatcatctggaattgtcactactaaatcaaccaccgatgatgcggatctttatgatacgtacaatgataatgatacagtaccaccaactactgtaggcggtagtacaacctctattagcaattataaaaccaaggactttgtagaaatatttggtattaccgcattaattatattgtcggccgtggcaatattctgtattacatattatatatataataaacgttcacgtaaatacaaaacagagaacaaagtctagatttttgacttacataaatgtctgggatagtaaaatctatcatattgagcggaccatctggttcaggaaagacagccatagccaaaagactatgggaatatatttggatttgtggtgtcccataccactagatttcctcgtcctatggaacgagaaggtgtcgattaccattacgttaacagagaggccatctggaagggaatagccgccggaaactttctagaacatactgagtttttaggaaatatttacggaacttctaaaactgctgtgaatacagcggctattaataatcgtatttgtgtgatggatctaaacatcgatggcgttagaagtcttaaaaatacgtacctaatgccttactcggtgtatataagacctacctctcttaaaatggttgagaccaagcttcgttgtagaaacactgaagcggatgatgagattcatcgtcgtgtgatgttggcaaaaactgacatggatgaggcaggtgaagccggtctattcgacactattatcattgaagatgatgtgaatttagcatatagtaagttaattcagatactacaggaccgtattagaatgtattttaacactaattagagacttaagacttaaaacttgataattaataatataactcgtttttatatgtggctatttcaacgtctaatgtattagttaaatattaaaacttaccacgtaaaacttaaaatttaaaatgatatttcattgacagatagatcacacattatgaactttcaaggacttgtgttaactgacaattgcaaaaatcaatgggtcgttggaccattaataggaaaaggtggattcggtagtatttatactactaatgacaataattatgtagtaaaaatagagcccaaagctaacggatcattatttaccgaacaggcattttatactagagtacttaaaccatccgttatcgaagaatggaaaaaatctcacaatataaagcacgtaggtcttatcacgtgcaaggcatttggtctatacaaatccattaatgtggaatatcgattcttggtaattaatagattaggtgcagatctagatgcggtgatcagagccaataataatagattaccaaaaaggtcggtgatgttgatcggaatcgaaatcttaaataccatacaatttatgcacgagcaaggatattctcacggagatattaaagcgagtaatatagtcttggatcaaatagataagaataaattatatctagtggattacggattggtttctaaattcatgtctaatggcgaacatgttccatttataagaaatccaaataaaatggataacggtactctagaatttacacctatagattcgcataaaggatacgttgtatctagacgtggagatctagaaacacttggatattgtatgattagatggttgggaggtatcttgccatggactaagatatctgaaacaaagaattgtgcattagtaagtgccacaaaacagaaatatgttaacaatactgcgactttgttaatgaccagtttgcaatatgcacctagagaattgctgcaatatattaccatggtaaactctttgacatattttgaggaacccaattacgacgagtttcggcacatattaatgcagggtgtatattattaagtgtggtgtttggtcgatgtaaaatttttgtcgataaaaattaaaaaataacttaatttattattgatctcgtgtgtacaaccgaaatcatggcgatgttttacgcacacgctctcggtgggtacgacgagaatcttcatgcctttcctggaatatcatcgactgttgccaatgatgtcaggaaatattctgttgtgtcagtttataataacaagtatgacattgtaaaagacaaatatatgtggtgttacagtcaggtgaacaagagatatattggagcactgctgcctatgtttgagtgcaatgaatatctacaaattggagatccgatccatgatcaagaaggaaatcaaatctctatcatcacatatcgccacaaaaactactatgctctaagcggaatcgggtacgagagtctagacttgtgtttggaaggagtagggattcatcatcacgtacttgaaacaggaaacgctgtatatggaaaagttcaacatgattattctactatcaaagagaaggccaaagaaatgaatgcactcagttcaggacctatcatcgattaccacgtctggataggagattgtatctgtcaagttactgctgtggacgtacatggaaaggaaattatgagaatgagattcaaaaagggtgcggtgctacagatcccaaatctggtaaaagttaaacttggggagaatgatacagaaaatctttcttctactatatcggcggcaccatcgaggtaaccacctctcaagaagaccgcgtgaataatgtactcatgaaacgtttggaaactatacgccatatgtggtctgttgtatatgatcattttgatattgtgaatggtaaagaatgctgttatgtgcatacgcattcatctaatcaaaatcctataccgagtactgtaaaaacaaatttgtacatgaagactatgggatcatgcattcaaatggattccatggaagctctagagtatcttagcgaactgaaggaatcaggtggatggagtcccagaccagaaatgcaggaatttgaatatccagatggagtggaagacactgaatcaattgagagattggtagaggagttcttcaatagatcagaacttcaggctggtaaattagtcaaatttggtaattctattaattgttaaacatacatctgtttcagctaagcaactaagaacacgtatacggcagcagcttccttttatactctcatcttttaccaacacaaagggtggatatttgttcattggagttgataataatacacacaaagtatttggattcacggtgggttacgactacctcagactgatagagaatgatatagaaaagcatatcaaaagactttgtgttgtgcatttctgtgagaagaaagaggacatcaagtacacgtgtcgattcatcaaggtatataaacctggggatgaggctacctcgacatacgtgtgcgctatcaaagtggaaagatgctgttgtgctgtgtttgcagattggccagaatcatggtatatggatactaatggtatcaagaagtattctccagatgaatgggtgtcacatataaaattttaattaatgtaactatagagaacaaataataggttgtaatatcatatagacaataactaacaattaattagtaactgttatctcttttttaactaaccaactaactatatacctattaatacatcgtaattatagttcttaacatctattaatcattgattcgcttctttaattttttataaactaacattgttaattgaaaagggataacatgttacagaatataaattatatatggatttttttaaaaaggaaatacttgactggagtgtatatttatctcttcattatatagcacgcgtgtgttccaattcttccacatcccatataatacaggattataatctcgttcgaacatacgagaaagtggataaaacaatagttgattttttatctaggttgccaaatttattccatattttagaatatggggaaaatattctacatatttattctatggatgatgctaatacgaatattataattttttttctagatagagtattaaatattaataagaacgggtcatttatacacaatctcaggttatcatcatccattaatataaaagaatatgtatatcaattagttaataatgatcatccagataataggataagactaatgcttgaaaatggacgtagaacaagacattttttgtcctatatatcagatacagttaatatctatatatgtattttaataaatcatggattttatatagatgcagaagacagttacggttgtacattattacatagatgtatatatcactataagaaatcagaatcagaatcatacaatgaattaattaagatattgttaaataatggatccgatgtagataaaaaagatacgtacggaaacacaccttttatcctattatgtaaacacgatatcaacaacgtggaattgtttgagatatgtttagagaatgctaatatagactctgtagactttaatagatatacacctcttcattatgtctcatgtcgtaataaatatgattttgtaaagttattaatttctaaaggagcaaatgttaatgcgcgtaataaattcggaactactccattttattgtggaattatacacggtatctcgcttataaaactatatttggaatcagacacagagttagaaatagataatgaacatatagttcgtcatttaataatttttgatgctgttgaatctttagattatctattatccagaggagttattgatattaactatcgtactatatacaacgaaacatctatttacgacgctgtcagttataatgcgtataatacgttggtctatctattaaacagaaatggtgattttgagacgattactactagtggatgtacatgtatttcggaagcagtcgcaaacaacaacaaaataataatggaagtactattgtctaaacgaccatctttgaaaattatgatacagtctatgatagcaattactaaaaataaacaacataatgcagatttattgaaaatgtgtataaaatatactgcgtgtatgaccgattatgatactcttatagatgtacagtcgctacagcaatataaatggtatattttaaaatgtttcgatgaaatagatatcatgaagagatgttatataaaaaataaaactgtattccaattagttttttgtatcaaagacattaatactttaatgagatatggtaaacatccttctttcgtgaagtgcactagtctcgacgtatacggaagtcgtgtacgtaatatcatagcatctattagatatcgtcagagattaattagtctattatccaagaagctggatgcgggagataaatggtcgtgttttcctaacgaaataaaatataaaatattggaaaactttaacgataacgaactatccacatatctaaaaatcttataaacactattaaaatataaaatctaagtaggataaaatcacactacatcattgtttccttttagtgctcgacagtgtatactatttttaacactcataaataaaaatgaaaacgatttccgttgttacgttgttatgcgtactacctgctgttgtttattcaacatgtactgtacccactatgaataacgctaaattaacgtctaccgaaacatcgtttaatgataaacagaaagttacatttacatgtgatcagggatatcattctttggatccaaatgctgtctgcgaaacagataaatggaaatacgaaaatccatgcaagaaaatgtgcacagtttctgattatgtctctgaattatatgataagccattatacgaagtgaattccaccatgacactaagttgcaacggcgaaacaaaatattttcgttgcgaagaaaaaaatggaaatacttcttggaatgatactgttacgtgtcctaatgcggaatgtcaacctcttcaattagaacacggatcgtgtcaaccagttaaagaaaaatactcatttggggaatatatgactatcaactgtgatgttggatatgaggttattggtgcttcgtacataagttgtacagctaattcttggaatgttattccatcatgtcaacaaaaatgtgatataccgtctctatctaatggattaatttccggatctacattttctatcggtggcgttatacatcttagttgtaaaagtggttttatactaacgggatctccatcatccacatgtatcgacggtaaatggaatcccatactcccaacatgtgtacgatctaacgaaaaatttgatccagtggatgatggtcccgacgatgagacagatttgagcaaactctcgaaagacgttgtacaatatgaacaagaaatagaatcgttagaagcaacttatcatataatcatagtggcgttaacaattatgggcgtcatatttttaatctccgttatagtattagtttgttcctgtgacaaaaataatgaccaatataagttccataaattgctaccgtaaatataaatccgttaaaataattaataatttaataacaaacaagtatcaaaagattaaagacttatagctagaatcaattgagatgtcttcttcagtggatgttgatatctacgatgccgttagagcatttttactcaggcactattataacaagagatttattgtgtatggaagaagtaacgccatattacataatatatacaggctatttacaagatgcgccgttataccgttcgatgatatagtacgtactatgccaaatgaatcacgtgttaaacaatgggtgatggatacacttaatggtataatgatgaatgaacgcgatgtttctgtaagcgttggcaccggaatactattcatggaaatgtttttcgattacaataaaaatagtatcaacaatcaactaatgtatgatataattaatagcgtatctataattctagctaatgagagatatagaagcgcttttaacgacgatggtatatacatccgtagaaatatgattaacaagttgtacggatacgcatctctaactactattggcacgatcgctggaggtgtttgttattatctgttgatgcatctagttagtttgtataaataattatttcaatatactagttaaaattttaagattttaaatgtataaaaaactaataacgtttttatttgtaataggtgcattagcatcctattcgaataatgagtacactccgtttaataaactgagtgtaaaactctatatagatggagtagataatatagaaaattcatatactgatgataataatgaattggtgttaaattttaaagagtacacaatttctattattacagagtcatgcgacgtcggatttgattccatagatatagatgttataaacgactataaaattattgatatgtataccattgactcgtctactattcaacgcagaggtcacacgtgtagaatatctaccaaattatcatgccattatgataagtacccttatattcacaaatatgatggtgatgagcaacaatattctattactgcagagggaaaatgctataaaggaataaaatatgaaataagtatgatcaacgatgatactctattgagaaaacatactcttaaaattggatctacttatatatttgatcgtcatggacatagtaatacatattattcaaaatatgatttttaaaaatttaaaatatattatcacttcagtgacagtagtcaaataacaaacaacaccatgagatatattataattctcgcagttttgttcattaatagtatacacgctaaaataactagttataagtttgaatccgtcaattttgattccaaaattgaatggactggggatggtctatacaatatatcccttaaaaattatggcatcaagacgtggcaaacaatgtatacaaatgtaccagaaggaacatacgacatatccgcatttccaaagaatgatttcgtatctttctgggttaaatttgaacaaggcgattataaagtggaagagtattgtacgggactatgcgtcgaagtaaaaattggaccaccgactgtaacattgactgaatacgacgaccatatcaatttgtacatcgagcatccgtatgctactagaggtagcaaaaagattcctatttacaaacgcggtgacatgtgtgatatctacttgttgtatacggctaacttcacattcggagattctaaagaaccagtaccatatgatatcgatgactacgattgcacgtctacaggttgcagcatagactttgtcacaacagaaaaagtgtgcgtgacagcacagggagccacagaagggtttctcgaaaaaattactccatggagttcgaaagtatgtctgacacctaaaaagagtgtatatacatgcgcaattagatccaaagaagatgttcccaatttcaaggacaaaatggccagagttatcaagagaaaatttaataaacagtctcaatcttatttaactaaatttctcggtagcacatcaaatgatgttaccacttttcttagcatgcttaacttgactaaatattcataactaatttttattaatgatacaaaaacgaaataaaactgcatattatacactggttaacgcccttataggctctaaccattttcaagatgaggtccctgattatagtccttctgttcccctctatcatctactccatgtctattagacgatgtgagaagactgaagaggaaacatggggattgaaaatagggttgtgtataattgccaaagatttctatcccgaaagaactgattgcagtgttcatctcccaactgcaagtgaaggattgataactgaaggcaatggattcagggatatacgaaacaccgataaattataaaaaaagcaatgtgtccgctgtttccgttaataatactattttcgtaactggcggattattcataaataactctaatagcacgatcgtggttaacaatatggaaaaacttgacatttataaagacaaacaatggtcgattatagaaatgcctatggctagggtatatcacggcatcgactcgacatttggaatgttatattttgccggaggtctatccgttaccgaacaatatggtaatttagagaaaaacaacgagatatcttgttacaatcctagaacgaataagtggtttgatatttcatatactatttataagatatccatatcatcattgtgtaaactaaataacgtcttctatgtatttagtaaggacattggatatgtggaaaagtatgatggtgcatggaagttagtacatgatcgtctccccgctataaaggcattatcaacttctccttattgattgaaaatgaaaatataaatagtttttatgtatagcagtattaccctatagttttattgcttactactaacatggatacagatgttacaaatgtagaagatatcataaatgaaatagatagagagaaagaagaaatactaaaaaatgtagaaattgaaaataataaaaacattaacaagaatcatccaagtggatatattagagaagcactcgttattaatacaagtagtaatagtgattccattgataaagaagttatagaatgtatcagtcacgatgtaggaatatagatcatatctactaatttttataatcgatacaaaacataaaaaacaactcgttattacatagcaggcatggaatccttcaagtattgttttgataacgatggcaagaaatggattatcggaaatactttatattctggtaattcaatactatataaggtcagaaaaaatttcactagttcgttctacaattacgtaatgaaaatagatcacaaatcacacaagccattgttgtctgaaatacgattctatatatctgtattggatcctttgactatcgacaactggacacgggaacgtggtataaagtatttggctattccagatctgtatggaattggagaaaccgatgattatatgttcttcgttataaagaattcgggaagagtattcgccccaaaggatactgaatcagtcttcgaagcatgcgtcactatgataaacacgttagagtttatacactctcgaggatttacccatggaaaaatagaaccgaggaatatactgattagaaataaacgtctttcactaattgactattctagaactaacaaactatacaagagtggaaactcacatatagattacaacgaggacatgataacttcaggaaatatcaattatatgtgtgtagacaatcatcttggagcaacagtttcaaaacgaggagatttagaaatgttgggatattgcatgatagaatggttcggtggcaaacttccatggaaaaacgaaagtagtataaaagtaataaaacaaaaaaaagaatataaaaaatttatagctactttctttgaggactgttttcctgaaggaaatgaacctctggaattagttagatatatagaattagtatacacgttagattattctcaaactcctaattatgacagactacgtaaactgtttatacaagattgaaattatattctttttttatagagtgtggtagtgttacggatatctaatattaatattagactatctctatcgcgctacacgaccaatatcgattactatggatatcttcagggaaatcgcatcttctatgaaaggagagaatgtattcatttctccagcgtcaatctcgtcagtattgacaatactgtattatggagctaatggatccactgctgaacagctatcaaaatatgtagaaacggaggagaacacggataaggttagcgctcagaatatctcattcaaatccatgaataaagtatatgggcgatattctgccgtgtttaaagattcctttttgagaaaaattggcgataagtttcaaactgttgacttcactgattgtcgcactatagatgcaatcaacaagtgtgtagatatctttactgaggggaaaatcaatccactattggatgaaccattgtctcctgatacctgtctcctagcaattagtgccgtatactttaaagcaaaatggttgatgccattcgaaaaggaatttaccagtgattatcccttttacgtatctccgacggaaatggtagatgtaagtatgatgtctatgtacggcaaggcatttaatcacgcatctgtaaaggaatcattcggcaacttttcaatcatagaactgccatatgttggagatactagtatgatggtcattcttccagacaagattgatggattagaatccatagaacaaaatctaacagatacaaattttaagaaatggtgtaactctctggaagctacgtttatcgatgttcacattcccaagtttaaggtaacaggttcgtataatcttgtggatactctagtaaagtcaggactgacagaggtgttcggttcaactggagattatagcaatatgtgtaattcagatgtgagtgtcgacgctatgattcacaaaacgtatatagatgtcaatgaagagtatacagaagcagctgcagcaacttgtgcactggtgtcagactgtgcatcaacaattacaaatgagttctgtgtagatcatccgttcatctatgtgattaggcatgttgatggaaaaattcttttcgttggtagatattgctctccgacaactaattgttaaccattttttttaaaaaaatagaaaaaacatgtggtattagtgcaggtcgttgttcttccaattgcaattggtaagatgacggccaactttagtacccacgtcttttcaccacagcactgtggatgtgacagactgaccagtattgatgacgtcagacaatgtttgactgaatatatttattggtcgtcctatgcataccgcaacaggcaatgcgctggacagttgtattccacactcctctcttttagagatgatgcggaatcagtgttcatcgacattcgcgagctggtaaaaaatatgccgtgggatgatgtcaaagattgtacagaaatcatccgttgttatataccggatgagcaaaaaaccatcagagagatttcggccatcatcggactttgtgcatatgctgctacttactggggaggtgaagaccatcccactagtaacagtctgaacgcattgtttgtgatgcttgagatgctcaattacgtggattataacatcatattccggcgtatgaattgatgagttgtacatcttgacattttctttcttctcttctccctttcttctcttctcccttcctccctcttctccctttcccagaaacaaacttttttacccactataaaataaaatgagtatactacctattatatttcttcctatatttttttattcttcattcgttcagacttttaacgcgcctgaatgtatcgacaaagggcaatattttgcatcattcatggagttagaaaacgagccagtaatcttaccatgtcctcaaataaatacgctatcatccggatataatatattagatattttatgggaaaaacgaggagcggataatgatagaattataccgatagataatggtagcaatatgctaattctgaacccgacacaatcagactctggtatttatatatgcattaccacgaacgaaacctactgtgacatgatgtcgttaaatttgacaatcgtgtctgtctcagaatcaaatatagatcttatctcgtatccacaaatagtaaatgagagatctactggcgaaatggtatgtcccaatattaatgcatttattgctagtaacgtaaacgcagatattatatggagcggacatcgacgccttagaaataagagacttaaacaacggacacctggaattattaccatagaagatgttagaaaaaatgatgctggttattatacatgtgttttagaatatatatacagaggtaaaacatataacgtaaccagaattgtaaaattagaggtacgggataaaataataccttctactatgcaattaccagatggcattgtaacttcaataggtagtaatttgactattgcgtgtagagtatcgttgagacctcccacaacggatgcagacgtcttttggataagtaatggtatgtattacgaagaagatgatggggacggagacggtagaataagtgtagcaaataaaatctatatgaccgataagagacgtgttattacatcccggttaaacattaatcctgtcaaggaagaagatgctacaacgtttacgtgtatggcgtttactattcctagcatcagcaaaacagttactgttagtataacgtgaatgtatgttgttacatttccatgtcaattgagtttataagaatttttatacattatcttccaacaaacaattgacgaacgtattgctatgattaactcccacgatactatgcatattattaatcattaacttgcagactatacctagtgctattttgacatactcatgttcttgtgtaattgcggtatctatattattaaagtacgtaaatctagctatagttttattatttaattttagataatataccgtctccttatttttaaaaattgccacatcctttattaaatcatgaatgggaatttctatgtcatcgttagtatattgtgaacaacaagagcagatatctataggaaagggtggaatgcgatacattgatctatgtagttttaaaacacacgcgaactttgaagaatttatataaatcattccatcgatacatccttctatgttgacatgtatatatccaggaattcttttattaatgtcaggaaatgtataaactaaaacattgcccgaaagcggtgcctctatctgcgttatatccgttcttaacttacaaaatgtaaccaatacctttgcatgacttgttttgttcggcaacgttagtttaaacttgacgaatggattaattacaatagcatgatccgcgcatctattaagtttttttactttaacgcccttgtatgtttttacagagactttatctaaatttctagtacttgtatgtgttataaatataacgggatatagaactgaatcacctaccttagatacccaattacattttatcagatccagataataaacaaattttgtcgccctaactaattctatattgttatatattttacaattggttatgatatcatgtaataacttggagtctaacgcgcatcgtcgtacgtttatacaattgtgatttagtgtagtatatctacacatgtatttttccgcactatagtattctggactagtgataaaactatcgttatatctgtcttcaatgaactcatcgagatattgctctctgtcatattcatacacctgcataaactttctagacatcttacaatccgtgttattttaggatcatatttacatatttacgggtatatcaaagatgttagattagttaatgggaatcgtctataataatgaatattaaacaattatatgaggacttttaccacaaagcatcataaaaatgagtcgtcgtctgatttatgttttaaatatcaaccgcaaatcaactcataaaatacaagagaatgaaatatatacatattttagtcattgcaatatagaccatacttctacagaacttgattttgtagttaaaaactatgatctaaacagacgacaacatgtaactgggtatactgcactacactgctatttgtataataattactttacaaacgatgtactgaagatattattaaatcatgacgtaaatgtaacgatgaaaaccagtagcggacgtatgcctgtttatatattgcttactagatgttgcaatatttcacatgatgtagtgatagatatgatagacaaagataaaaaccacttattacatagagactattccaacctattactagagtatataaaatctcgttacatgttattaaaggaagaggatatcgatgagaacatagtatccactttattagataagggaatcgatcctaactttaaacaagacggatatacagcgttacattattattatttgtgtctcgcacacgtttataaaccaggtgagtgtagaaaaccgataacgataaaaaaggccaagcgaattatttctttgtttatacaacatggagctaatctaaacgcgttagataattgtggtaatacaccattccatttgtatcttagtattgaaatgtgtaataatattcatatgactaaaatgctgttgacttttaatccgaatttcaaaatatgtaataatcatggattaacgcctatactatgttatataacttccgactacatacaacacgatattcttgttatgttaatacatcactatgaaacaaatgttggagaaatgccgatagatgagcgtcgtatgatcgtattcgagtttatcaaaacatattctacacgtccggcagattcgataacttatttgatgaataggtttaaaaatataaatatttatacccgctatgaaggaaagacattattacacgtagcatgtgaatataataatacacacgtaatagattatcttatacgtatcaacggagatataaatgcgttaaccgacaataacaaacacgctacacaactcattatagataacaaagaaaattccccgtataccatcgattgtttactgtatatacttagatatattgtagataagaatgtgataagatcgttggtggatcaacttccatctctacctatcttcgatataaaatcatttgagaaattcatatcctactgtatacttttagatgacacattttacgataggcacgttaagaatcgcgattctaaaacgtatcgatacgcattttcaaaatacatgtcgtttgataaatacgatggtataataactaaatgtcacgacgaaacaatgttactcaaactgtccactgttctagacactacactatatgcagttttaagatgccataattcgaaaaagttaagaagatacctcaacgagttaaaaaaatataataacgataagtcctttaaaatatattctaatattatgaatgagagataccttaatgtatattataaagatatgtacgtgtcaaaggtatatgataaactatttcctgttttcacagataaaaattgtctactaacattactaccttcagaaattatatacgaaatattatacatgctgacaattaacgatctttataatatatcgtatccacctaccaaagtatagttgtatttttctcatgcgatgtgtgtaaaaaaactgatattatataaatattttagtgccgtataataaagatgacgatgaaaatgatggtacatatatatttcgtatcattattgttattgctattccacagttacgccatagacatcgaaaatgaaatcacagaattcttcaataaaatgagagatactctaccagctaaagactctaaatggttgaatccagcatgtatgttcggaggcacaatgaatgatatagccgctctaggagagccattcagcgcaaagtgtcctcctattgaagacagtcttttatcgcacagatataaagactatgtggttaaatgggagaggctagaaaagaatagacggcgacaggtttctaataaacgtgttaaacatggtgatttatggatagccaactatacatctaaattcagtaaccgtaggtatttgtgtaccgtaactacaaagaatggtgactgtgttcagggtatagttagatctcatattaaaaaacctccttcatgcattccaaaaacatatgaactaggtactcatgataagtatggcatagacttatactgtggaattctttacgcaaaacattataataatataacttggtataaagataataaggaaattaatatcgacgacattaagtattcacaaacgggaaagaaattaattattcataatccagagttagaagatagtggaagatacaactgttacgttcattacgacgacgttagaatcaagaatgatatcgtagtatcaagatgtaaaatacttacggttataccgtcgcaagaccacaggtttaaactaatactagatccaaaaatcaacgtaacgataggagaacctgccaatataacatgcactgctgtgtcaacgtcattattgattgacgatgtactgattgaatgggaaaatccatccggatggcttataggattcgattttgatgtatactctgttttaactagtagaggcggtattaccgaggcgaccttgtactttgaaaatgttactgaagaatatataggtaatacatataaatgtcgtggacacaactattattttgaaaaaacccttacaactacagtagtattggagtaaatacacaatgcatttttatatacattactgaataattattattattatttatatcgtatttgtgctataacgcgactatctaggtatttgtatctcactgatagagaacatataaatatagactctattaaacagttgtgtaaaatatcaaatcctaatagatgtggatgtacggctttacatgagtacttttataattatagatcagtcaacggaaaatacaagtatagatacaacggttactatcaatattatttatctagcgattatgaaaattataatgaatattattatgatgattatgatagaactggtatgaacagtgagagtgataatatatcaatcaaaacagaatatgaattctatgatgaaacacaagatcaaagtacacaactagtaggttacgacattaaactcaaaaccaatgaggatgattttatggctatgatagatcagtgggtgtccatgattatatagatgaatcaattaataaagtagtatatggaagagagtctcacgtaagatggcgggatatatggcaagaacataatgatggcgtatacagtataggaaaggagtgcatagataatatatacgaagacaaccataccgtagacgaattctacaagatagacagcgtatcagatgtagatgacgcggaacacatatctccgataactaatgatgtatctacacaaacatgggaaaagaaatcagagttagatagatacatggaaatgtatcctcgtcatagatatagtaagcattctgtctttaagggattttctgacaaagttagaaaaaatgatttagacatgaatgtggtaaaagaattactttctaacggtgcatctctaacaattaaggatagcagtaataaggatccaataaccgtttattttcgaagaacgataatgaatttagaaatgattgatattattaacaaacatacaactattgatgaacgaaagtatatagtacactcctatctaaaaaattataaaaatttcgattatccatttttcaggaagttagttttgactaataaacattgtctcaacaattattataatataagcgacagcaaatatggaacaccgctacatatattggcgtctaataaaaaattaataactcctaattacatgaagttattagtgtataacggaaatgatataaacgcacgaggtgaagatacacaaatgcgaactccattacacaaatatttgtgtaaatttgtatatcataatattgaatatggtatccgatactataatgaaaagattatagacgcatttatagagttaggagccgatctaactattccaaataacgatggaatgataccagtagtttactgtatacactcaaatgcagaatatggttataacaatattactaacataaagataatacgtaaactacttaatcttagtagacgtgcgtcacataatctatttagagatcgagtcatgcacgattatataagtaatacatatattgatcttgagtgtttagatattattagatcgttggatggattcgatatcaatggttactttgaaggacgtacaccacttcattgcgctatacaacataacttcactcagattgctaagtacttattagatcgaggagctgatatagtcgtacccaacacattgattatacatcagtacatacagtaaatagcatagatatggaggaggatacaaatatttcaaataaagttataaggtacaacactgtcaataatatatggaagacattacctaacttctggactggaactataaatccaggcgtggtctcgcataaagatgatatatatgttgtatgcgacatcaaagatgaaaaaaatgttaagacttgtatatttagatataacacgaatacgtataacggatgggaattggttacgacgacagaaagcagattatcagctctgcatactattcttcatgacaataccataatgatgttacattgttatgaatcgtatatgttacaagatacatttaatgtgtacactcgcgaatggaatcatatgtgtcatcaacattcgaatagttatatcatgtacaatatactacccatctactaaatataatagaataaaataaatgagtatgatcattttagataacgattgattttatcattaccgcttcattcttatattctttgcttacggaacctatatttagaaacatctactaacgattttttatgcttgcattattaatggtatgtaatatgattgattgtgtacgcaataccaatttgttaagtatgaatacggggtacaaacataaactgaaatttaacattatttatttatgatatatatcgttatcgttattgtttggtctataccatggatatctttaaagaactaatcttaaaacaccctgatgaaaatgttttgatttctccagtttctattttatctactttatctattctaaatcatggagcagctggttctacagctgaacaactatcaaaatatatagagaatatgaatgagaatacacccgatgataagaaggatgacaataatgacatggacgtagatattccgtattgtgcgacactagctaccgcaaataaaatatacggtagcgatagtatcgagttccacgcctccttcctacaaaaaataaaagacgattttcaaactgtaaactttaataatgctaaccaaacaaaggaactaatcaacgaatgggttaagacgatgacaaatggtaaaattaattccttattgactagtccgctatccattaatactcgtatgacagttgttagcgccgtccattttaaagcaatgtggaaatatccattttctaaacatcttacatatacagacaagttttatatttctaagaatatagttaccagtgttgatatgatggtgggtaccgagaataacttgcaatatgtacatattaatgaattattcggaggattctctattatcgatattccatacgagggaaactctagtatggtaattatactaccggacgacatagaaggtatatataacatagaaaaaaatataacagatgaaaaatttaaaaaatggtgtggtatgttatctactaaaagtatagacttgtatatgccaaagtttaaagtggaaatgacagaaccgtataatctggtaccgattttagaaaatttaggacttactaatatattcggatattatgcagattttagcaagatgtgtaatgaaactatcactgtagaaaaatttctacatacgacgtttatagatgttaatgaggagtatacagaagcatcggccgttacaggagtatttatgactaacttttcgatggtatatcgtacgaaggtctacataaaccatccattcatgtacatgattaaagacaacacaggacgtatactttttatagggaaatactgctatccgcaataaatataaacaaatagacttttatcacgtttatctatgtctaaatattacaaatagtaatagtataaactaaagctgataatacttaaaaaaataataatatcatttacaattaatagtataaactaaaaattaaacaaatcgttattataagtaatatcaaaatgatgatatacggattaatagcgtgtcttatattcgtgacttcatccatcgctagtccactttatattcccgttattccacccattacggaagataaatcgttcaatagtgtagaggtattagtttccttgtttagagatgaccaaaaagactatacggtaacttctcagttcaataactacactatcgataccaaagactggactatcggcgtactatccacacctgatggtttggatataccattgactaatataacttattggtcacggtttactataggtcgtgcattgttcaaatcagagtctgaggatattttccaaaagaaaatgagtattctaggtgtttctatagaatgtaagaagtcgtcgacattacttacttttttgaccgtgcgtaaaatgactcgagtatttaataaatttccagatatggcttattatcgaggagactgtttaaaagccgtttatgtaacaatgacttataaaaatactaaaactggagagactgattacacgtacctctctaatggggggttgcctgcatactatcgtaatggggtcgatggttgattattgattagtatattccttattcacacaaaaagaacatttttataaacatgaaaccactgtctaaatgtaattatgatcttgatttatagatgaagatcagcctttagaggattttaaccagtatgtttaatatgaaaaaaataaacataacatattttgagattaagcgctattgtgcttaattattttgctctataaactgaatatatagccacaattattgacgggcttgtttatgaccggcaatcatgaatttacagaaattatctctggctatatatcttactgcgacatgttcgtggtgttatgaaacatgcataagaaaaactgcgttgtatcatgacattcaattggagcatgtagaagacaataaagatagtgtagcgtcgctaccgtacaagtagtcaatcaaagagaacgtagtagattgttggctacatttaattggacagatatagctgagggtgttagaaatgagttcattaaaatatgtgatatcaacggaacatatttatataattatactattgctgttagtataattattgattccacggaagaactaccaacagttactccaattacaacaacatatgaaccttctacatataattatactatcgatgatagcactgttattactactgaagaactacaagtgactcctcatatggatctccatcgatgatacatgtattaaaatactttccgaataagtcttttaaatattgtattaattatgaaaaactatgctatgcgagtatgatgcaaagatgtttaatgatacgatactagattttatctctagcgagagatgtcgttagaatcatttatcataactacgtttaataataattcatcaacgaatatcgataacatgtgtcatttatacgttaaagtctgtccgtcttctctattgtttagactgtttgtagaatgctgtgatataaacaaactagtagaaggtacgactccgttacactgttatctaatgaatgaaggatttgaatcatctgttttaaaaaacctattaaaggagtatgtcatgaatacgtttaatgttcatgacatccattacacaaatatttaactcatgatgaagttgagaatgatatgctttctgatagtatagatagctttagctaatataaaaatatattaatccactatatattctagacttgatttaaaaccgataaactactactacgtactgtataagttgttaaaaaaaggagcagaccctaattatgtagatgatagaggtaatacttttcttcattacttctgcatctatatgtccacttatgagaaaacgtcatttaataagatgcatcgtgaaaagaaatttattaaagagttggtaaaatatgaaaccgaaagtaaataatataggaaatacacctctacataactacgtatctcaatatgatatcactctcattcctcatccacaacccattaaaaaaatggaaattaaagccctctattagcataaacggctacaggtctacctttacaatggcctctccttgtgcccagttcagaccctgtcattgccacgctactaaggactccctgaataccgtggccgacgtcagacattgtctgactgaatacatcctgtgggtttctcatagatggacccatagagaaagcgcagggtctctctacaggcttctcatctctttcagaactgatgcaacggagctctttggtggtgagttgaaggattcacttccgtgggacaatatcgacaattgcgtggagatcattaaatgtttcatcagaaatgactccatgaaaaccgccgaagaacttcgtgcaatcattggactttgtactcaatcagctatcgtctctggaagagtcttcaacgataagtatatcgacatactacttatgctgcgaaagattctgaacgagaacgactatctcaccctcttggatcatatccgcactgctaaatactaaatctccttcatgctctctcactacactttttatcatcttatgaggaatgattgccttcatcatttttcgtgaaataggaataattagcaccagaatagctatggattgcacatgtattctatgtcgtctactggatgaagatgtgacgtacaaaaaaataaaactagaaattgaaacgtgtcacaacttatcaaaacatatagatagacgaggaaacaatgcgctacattgttacgtcttcaataaatgcgatacagacattaagattgttcgactgttactctctcgcggagtcgagagactttgtagaaacaacgaaggattaactccgctaggagcatacagtaagcatagatacgtaaaatctcaaattgtgcatctactgatatccagctattcgaattcctctaacgaactcaagtcgaatataaatgatttcgatctgtattcgtatatgtcttcggataatatcgacttacgtctgctaaaatacctaattgtggataaacggatacgtccgtccaagaatacgaattatgcaatcaatggtctcggattggtggatatatacgtaacgacgcctaatccgagaccagaagtattgctatggcttcttaaatcagaatgttacagcaccggttacgtatttcgtacctgtatgtacgacagtgatatgtgtaagaactctcttcattactatatatcgtctcatagagaatctcaatctctatccaaggatgtaattaaatgtttgatcaataacaatgtttccatccatggcagagacgaaggaggatctttacccatccaatactactggtcttgctcaaccatagatatagagattgttaaattattaataaaggatgtggacacgtgtagagtatacgacgtcagccctatattagaggcggattatctaaacaagcgatttagagtaaccccatataatgtagacatggaaatcgttaatcttcttattgagagacgtcatactcttgtcgacgtaatgcgtagtattacttcttacgattccagagactataaccactacatcatcgataacattctaaagagatttagacaacaggatgaatccatcgtacaagccatgttgataaactacttacattacggcgatatggtcgttcgatgcatgttagataacggacaacaactatcctctgcacgactactttgttaataataatctcgtcgatgtaaacgtcgtaaggtttatcgtggaaaataatggacacatggctgtaaatcacgtatcgaacaatggccgtctatgtatgtacggtctgatattatcgagatttaataattgcgggtatcactgttatgaaaccatactaatagatgtatttgatatactaagcaagtacatggataatatagatatgatcgataatgagaataaaactctactatattacgcggtcgatgtcaataatatacaatttgcaaagcggttattggaatatggagcgagtgttacaacatcacgctcgataatcaatacggccatccagaaaagtagttacagaagagaaaacaaaacgaggatagttgatttattacttagctaccatcccactctagagactatgattgacgcatttaatagagatatacgctatctatatcctgaaccattattcgcctgtatcagatacgccttaatcctagatgatgattttccttctaaagtaagtatgatatctccggtcgtcataaggaactaaagcgctatagagtagacattaatagaatgaagaatgcctacatatcaggcgtctccatgtttgatatattatttaaacgaagcaaacgccacagattgagatacgcaaagaatccgacatcaaatggtacaaaaaagaactaacgtccatcattacagaaactgtaaagaacaatgagaggatcgactccatagtggacaacattaatacagacgataacttgatttcgaaattacccatggagatactttattactccattaaataatttatcatggagcgataatgtcctgtttcatttgtttccatgacatattacaaaatcgattccgtccaagatgataaaaacatttaccggcatcataaacacggagtttattttatatgtctcgcataaacattactaaaaaaatatattgttcggttttctttcacatctttaattatgaaaaagtaaatcattatgagatggacgagattgtacgcatcgttcgcgacagtatgtggtacatacctaacgtatttatggacgacggtaagaatgaaggtcacgtttctgtcaacaatgtttgtcatatgtattttacgttctttgatgtggatacatcgtctcatctgtttaagctagttattaaacactgcgatctgaataaacgaggtaactctccattacattgctatacgatgaatacacgatttaatccatctgtattaaagatattgttacaccacggcatgcgtaactttgatagcaaggatgaaaaaggacatattcctctacaccactatctgattcattcactatcaatcgataacaagatctttgatatactaacggacaccattgatgactttagtaaatcatccgatctattgctgtgttatcttagatataaattcaatgggagcttaaactattacgttctgtacaaaggatccgaccctaattgcgtcgacgaggatggactcacttctcttcattactactgtaaacacatatccacgttctacaaaagcaattattacaagttaagtcacactaagatgcgagccgagaagcgattcatctacgcgataatagattatggagcaaacattaacgcggttacacacttaccttcaacagtataccaaacatagtcctcgtgtggtgtatgctcttttatctcgaggagccgatacgaggatacgtaataatcttgattgtacacccatcatggaacgattgtgcaacaggtcatattctcataatgttactcaattggcacgaacaaaaggaagaaggacaacatctactttatctattcataaaacataatcaaggatacactctcaatatactacggtatctactagataggttcgacattcagaaagacgaatactataataccgcctttcaaaattgtaacaacaatgttgcctcatacatcggatacgacatcaaccttccgactaaagacggtattcgacttggtgtttgaaaacagaaacatcatatacaaggcggatgttgtgaatgacatcatccaccacagactgaaagtatctctacctatgattaaatcgttgttctacaagatgtcagaattctctccctacgacgattactacgtaaaaaagatactagcctactgcctattaagggacgagtcattcgcggaactacatagtaaattctgtttaaacgaggactataaaagtgtatttatgaaaaatatatcattcgataagatagattccatcatcgtgacataagtcgccttaaagagattcgaatctccgacaccgacctgtatacggtatcacagctatcttaaagccatacattcggacagacacatttcatttcccatgtacgacgatctcatagaacagtgccatctatcgatggagcataaaagtaaactcgtcgacaaagcactcaataaattagagtctaccatcggtcaatctagactatcgtatttgcctccggaaattatgcgcaatatcatctaaacagtatgttgtacggaaagaaccattacaaatattatccatgatagaaagaaaatatctatatgattggagaagtaggaaacaggaacaagacgacgattactacattattaaatcatgaagtccgtattatactcgtatatattgtttctctcatgtataataataaacggaagagatatagcaccgcatgcaccatccgatggaaagtgtaaagacaacgaatacaaacgccataatttgtgtccgggaacatacgcttccagattatgcgatagcaagactaacacacgatgtacaccctgtggttcgggtaccttcacatctcgcaataatcatttacccgcttgtctaagttgtaacggaagacgcgatcgtgtaacacgactcacaatagaatctgtgaatgctctcccggatattattgtcttctcaaaggatcatccggatgcaaggcatgtgtttcccaaacaaaatgtggaataggatacggagtatccggagacgtcatctgttctccgtgtggtctcggaacatattctcacaccgtctcttccgcagataaatgcgaacccgtacccagtaatacctttaactatatcgatgtggaaattaatctgtatcccgtcaacgacacgtcgtgtactcggacgaccactaccggtctcagtgaatccatctcaacgtcggaactaactattactatgaatcataaagactgtaatcccgtatttcgtgaggaatacttctctgtccttaataaggtagcaacttcaggtttctttacaggagaaaggtgtgcactctgaatttcgagattaaatgcaataacaaagattcttcctccaaacagttaacgaaagcaaagaatgatgacggtatcatgccgcattcggagacagtaactctagtgggcgactgtatatctagcgtcgacatctatatactatatagtaataccaatactcaagactacgaaactgatacaatctcttatcatgtgggtaatgttctcgatgtcgatagccatatgcccggtagttgcgatatacataaactgatcactaattccaaacccacccgctttttatagtaagtttttcacccataaataataaatacaataattaatttctcgtaaaagtagaaaatatattctaatttattgcatggtaaggaagtagaatcataaagaacagtactcaatcaatagcaattatgaaacaatatatcgtcctggcatgcatgtgcctgccagtcttcagcaatcatcctcatcctcatcctcgtgtacggaagaagaaaacaaacatcatatgggaatcgatgttattatcaaagtcacaaagcaagaccaaacaccgaccaatgataagatttgccaatccgtaacggaaattacagagtccgagtcagatccaaatcccgaggtggaatcagaagatgattccacatcagtcgaggatgtagatcctcctaccacttattactccatcatcggtggaggtctgagaatgaactttggattcaccaaatgtcctcagattaaatccatctcagaatccgctgatggaaacacagtgaatgctagattgtccagcgtgtccccaggacaaggtaaggactctcccgcgatcactcatgaagaagctcttgctatgatcaaagactgtgaggtgtctatcgacatcagatgtagcgaagaagagaaagacagcgacatcaagacccatccagtactcgggtctaacatctctcataagaaagtgagttacgaagatatcatcggttcaacgatcgtcgatacaaaatgtgtcaagaatctagagtttagcgttcgtatcggagacatgtgcaaggaatcatctgaacttgaggtcaaggatggattcaagtatgtcgacggatcggcatctgaaggtgcaaccgatgatacttcactcatcgattcaacaaaactcaaagcgtgtgtctgaatcgataactctattcatctgaaattggatgagtagggttaatcgaacgattcaggcacaccacgaattaaaaaagtgtaccggacactatattccggtttgcaaaacaaaaatgttcttaactacattcacaaaaagttacctctcgcgacttcttctttttctgtctcaatagtgtgatacgattatgacactattcctattcctattcctatttcctttcagggtatcacaaaaatattaaacctctttctgatggtctcataaaaaaagttttacaaaaatatttttattctctttctctctttgatggtctcataaaaaaagttttacaaaaatatttttattctctttctctctttgat

SEQ ID NO: 51 - protein, 427 aa, Homo sapiens
  REGION 1..427: note = Human interferon regulatory factor 3
MGTPKPRILPWLVSQLDLGQLEGVAWVNKSRTRFRIPWKHGLRQDAQQEDFGIFQAWAEATGAYVPGRDKPDLPTWKRNFRSALNRKEGLRLAEDRSKDPHDPHKIYEFVNSGVGDFSQPDTSPDTNGGGSTSDTQEDILDELLGNMVLAPLPDPGPPSLAVAPEPCPQPLRSPSLDNPTPFPNLGPSENPLKRLLVPGEEWEFEVTAFYRGRQVFQQTISCPEGLRLVGSEVGDRTLPGWPVTLPDPGMSLTDRGVMSYVRHVLSCLGGGLALWRAGQWLWAQRLGHCHTYWAVSEELLPNSGHGPDGEVPKDKEGGVFDLGPFIVDLITFTEGSGRSPRYALWFCVGESWPQDQPWTKRLVMVKVVPTCLRALVEMARVGGASSLENTVDLHISNSHPLSLTSDQYKAYLQDLVEGMDFQGPGES

SEQ ID NO: 52 - protein, 419 aa, Mus musculus
  REGION 1..419: note = Mouse interferon regulatory factor 3
METPKPRILPWLVSQLDLGQLEGVAWLDESRTRFRIPWKHGLRQDAQMADFGIFQAWAEASGAYTPGKDKPDVSTWKRNFRSALNRKEVLRLAADNSKDPYDPHKVYEFVTPGARDFVHLGASPDTNGKSSLPHSQENLPKLFDGLILGPLKDEGSSDLAIVSDPSQQLPSPNVNNFLNPAPQENPLKQLLAEEQWEFEVTAFYRGRQVFQQTLFCPGGLRLVGSTADMTLPWQPVTLPDPEGFLTDKLVKEYVGQVLKGLGNGLALWQAGQCLWAQRLGHSHAFWALGEELLPDSGRGPDGEVHKDKDGAVFDLRPFVADLIAFMEGSGHSPRYTLWFCMGEMWPQDQPWVKRLVMVKVVPTCLKELLEMAREGGASSLKTVDLHISNSQPISLTSDQYKAYLQDLVEDMDFQATGNI

SEQ ID NO: 53 - DNA, 70 bp, Vaccinia virus
  source 1..70: mol_type = genomic DNA
  misc_feature 1..70: note = mH5 promoter
aaaaattgaaaataaatacaaaggttcttgagggttgtgttaaattgaaagcgagaaataatcataaata

SEQ ID NO: 54 - protein, 219 aa, Vaccinia virus
  REGION 1..219: note = B2R ORF
MAMFYAHALGGYDENLHAFPGISSTVANDVRKYSVVSVYNNKYDIVKDKYMWCYSQVNKRYIGALLPMFECNEYLQIGDPIHDQEGNQISIITYRHKNYYALSGIGYESLDLCLEGVGIHHHVLETGNAVYGKVQHDYSTIKEKAKEMNALSSGPIIDYHVWIGDCICQVTAVDVHGKEIMRMRFKKGAVLQIPNLVKVKLGENDTENLSSTISAAPSR

SEQ ID NO: 55 - DNA, 40 bp, Vaccinia virus
  source 1..40: mol_type = genomic DNA
  misc_feature 1..40: note = strong early/late promoter (SEL)
aaaaattgaaattttattttttttttttggaatataaata

SEQ ID NO: 56 - protein, 107 aa, Homo sapiens
  REGION 1..107: note = FKBP-F36V
GVQVETISPGDGRTFPKRGQTCVVHYTGMLEDGKKVDSSRDRNKPFKFMLGKQEVIRGWEEGVAQMSVGQRAKLTISPDYAYGATGHPGIIPPHATLVFDVELLKLE

SEQ ID NO: 57 - protein, 77 aa, Vaccinia virus
  REGION 1..77: note = VAC_IHDW1_017, ankyrin-like protein; A66T
MLKLKDIAMALLEATGFSNINDFNIFSYMKSKNVDVDLIKVLVEHGFDLSVKCENHRSVIENYVMTMILFLKLLICS

SEQ ID NO: 58 - DNA, 516 bp, Vaccinia virus
  source 1..516: mol_type = genomic DNA
  misc_feature 1..516: note = ORF 038 (K5L) of VIP02, 31940-32455
tcacttcactctattaaaaatccaagtttctatttctttcatgactgattttttaacttcatccgtttccttatgaagatgatgtttggcaccttcataaatttttatttctctattacaatttgcatgttgcatgaaataatatgcacctaaaacatcgctaatctcattgtttgttccctggagtatgagagtcgggggggtgttaatcttggaaattatttttctaaccttgttggtagccttcaagacctgactagcaaatccagccttaattttttcatgattgattaatgggtcgtattggtatttataaactttatccatatctctagatactgattctggacatagctttccgactggcgcatttggtgtgatggttcccataagtttggcagctagcagattcagttttgaaacagcatctgcattaactagaggagacattagaatcattgctgtaaacaagtttggattatcgtaagaggctagtatagaaattgttgctcccat

SEQ ID NO: 59 - protein, 171 aa, Vaccinia virus
  REGION 1..171: note = ORF 038 (K5L) of VIP02, putative monoglyceride lipase
MGATISILASYDNPNLFTAMILMSPLVNADAVSKLNLLAAKLMGTITPNAPVGKLCPESVSRDMDKVYKYQYDPLINHEKIKAGFASQVLKATNKVRKIISKINTPPTLILQGTNNEISDVLGAYYFMQHANCNREIKIYEGAKHHLHKETDEVKKSVMKEIETWIFNRVK

SEQ ID NO: 60 - protein, 737 aa, Vaccinia virus
  REGION 1..737: note = 059 (E2L) ORF, IEV morphogenesis protein; L419F
MISVTDIRRAFLDNECHTITKAFGYLHEDKAIALIKIGFHPTYLPKVLYNNVVEFVPEKLYLFKPRTVAPLDLISTITKLKNVDKFASHINYHKNSILITGDKSLIVKCMPYMIISDDDIRFIREQFVGTNSIEYILSFINKESIYRMSYQFSENEIVTIINRDHFMYEPIYEHQVLDSDFLKTMLDRYGIVPINSGIIDELCPEAIIEILMAVVRPRDAIRFLDIVNKNQLTEDSVKNYIINDIRRGKIDYYIPYVEDFLEDRTEDLGIYANIFFEDAIDITKLDITKTELEHISKYMNYYTTYIDHIVNIILQNNYIDILASIIDYVQDVLTEELCIRIVCESTNPVPVTSLPIHSTLVMVMCIQMKYVDIVEFLDEIDIDTLIEKGADPITEYTFTTRWYNKHNDLITLYIKKYGFCPMMMKRLMFEYPLTKEASDHLLKTMDENRGAIMFFPRTICTLPYLLCCNYKLIQKPIPFKEENRNIVYKKNNRVLCFDSLENSAFKSLIKIDSIPGLKTYNMKDITYEKSNNIICVRFIPQESIHNEERRIKLQLFDIARLASYGLYYIPSRYLSSWTPVVNMIEGREYTNPQKIECLVILDLFSEEFIEYQNLGNAVSNKYELEYTISNYQAAINCLMSTLLIYLVLGSIRSISRTENFVLSILNIFYKGLKINELLSEPVSGVCIELDKIKDRASSGNSSFIFLKKNELSKTLSLCEKVCVETILDNNQSFKSSK

SEQ ID NO: 61 - protein, 795 aa, Vaccinia virus
  REGION 1..795: note = ORF 104 (H4L) of VIP02
MDSKETILIEIIPKIKAYLLDANISPKSYDDFISRNKNIFVINLYNVSTITEEDIRLLYTTIEQNIDADDQTLVAIFSYIGYKFEQAVKEEISTSLSFNDKNTTDEMTYNLYDLFFNTLDMYLRQKKISILVNDDVRGDVIVSYKNSDLVSSFNAELEPEIKKIPFNMKNLLPYLEKNLDQLRFSKKYLDFAYLCRHIGIPISKKKYNVRYVFLYKIDGLSIPIIIKDFLDVKYVYLENTGKIYKNSFSEDHNNSLSDWGKVIIPLLKDRHLYSYIFLSSYHLHSYYTDLIARDEPVFVKRKKLDIIEIDEPEAWKRDVRVEFAPCEHQIRLKEAMKVDANYFTKINNFANEFIYYEDGVAYCRVCGINIPIFNLDAADVIKNTVIVSTFNKTIFLSEPYSYFVHSQRFIFNIIMSFDNIMKSQTWVMKYNINRLILNFLIDINSRRQEYEKKFSSEIKRGLFFLRLSANLFESQVSSTELFYVSKMLNLNYIVALVIILNSSADFIVSYMTSKNKTVEESTLKYAISVVIYDFLVKTRICEKGSLDTIVLFTDVYTSIMPEELDLHFQRITLELRKLVSIQRSALEPNYDVESRGEELPLSALKFFDTSTIIVKTMAPVHTCVEQKIVAPTPSVEPTDASLKNFKELTCDEDIKILIRVHDTNATKLVIFPSHLKIEIERKKLIIPLKSLYITNTLKYYYSNSYLYVFRFGDPMPFEEELIDHEHVQYKINCYNILRYHLLPDSDVFVYFSNSLNREALEYAFYIFLSKYVNVKQWIDENITRIKELYMINFNN

SEQ ID NO: 62 - DNA, 948 bp, Vaccinia virus
  source 1..948: mol_type = genomic DNA
  misc_feature 1..948: note = ORF182 (A56R) of VIP02
atgacacgattaccaatacttttgttactaatatcattagtatacgctacaccttttcctcagacatctaaaaaaataggtgatgatgcaactctatcatgtaatcgaaataatacaaatgactacgttgttatgagtgcttggtataaggagcccaattccattattcttttagctgctaaaagcgacgtcttgtattttgataattataccaaggataaaatatcttacgactctccatacgatgatctagttacaactatcacaattaaatcattgactgctagagatgccggtacttatgtatgtgcattctttatgacatcaactacaaatgacactgataaagtagattatgaagaatactccacagagttgattgtaaatacagatagtgaatcgactatagacataatactatctggatctacacattcaccagaaactagttctgagaaaccagaggatatagataattttaattgctcgtcggtattcgaaatcgcgactccggaaccaattactgataatgtagaagatcatacagacaccgtcacatacactagtgatagcattaatacagtaagtgcatcatctggagaatccacaacagacgagactccggaaccaattactgataaagaagaagatcatacagtcacagacactgtctcatacactacagtaagtacatcatctggaattgtcactactaaatcaaccaccgatgatgcggatctttatgatacgtacaatgataatgatacagtaccaccaactactgtaggcggtagtacaacctctattagcaattataaaaccaaggactttgtagaaatatttggtattaccgcattaattatattgtcggccgtggcaatattctgtattacatattatatatataataaacgttcacgtaaatacaaaacagagaacaaagtctag

SEQ ID NO: 63 - protein, 315 aa, Vaccinia virus
  REGION 1..315: note = ORF182 (A56R) of VIP02
MTRLPILLLLISLVYATPFPQTSKKIGDDATLSCNRNNTNDYVVMSAWYKEPNSIILLAAKSDVLYFDNYTKDKISYDSPYDDLVTTITIKSLTARDAGTYVCAFFMTSTTNDTDKVDYEEYSTELIVNTDSESTIDIILSGSTHSPETSSEKPEDIDNFNCSSVFEIATPEPITDNVEDHTDTVTYTSDSINTVSASSGESTTDETPEPITDKEEDHTVTDTVSYTTVSTSSGIVTTKSTTDDADLYDTYNDNDTVPPTTVGGSTTSISNYKTKDFVEIFGITALIILSAVAIFCITYYIYNKRSRKYKTENKV

SEQ ID NO: 64 - protein, 49 aa, Vaccinia virus
  REGION 1..49: note = 054 ORF (F14.5L) of VIP02
MVIGLVIFVSVAAAIVGVLSNVLDMLMYVEENNEEDARIKEEQELLLLY

SEQ ID NO: 65 - DNA, 150 bp, Vaccinia virus
  source 1..150: mol_type = genomic DNA
  misc_feature 1..150: note = 054 ORF (F14.5L) of VIP02
atggtcatcggtctagtcatattcgtgtctgtggcggccgccatcgtcggtgtgttgtctaacgtattggacatgcttatgtacgtagaagaaaataatgaagaggatgctagaatcaaggaggagcaagaactactgttgctatattga

SEQ ID NO: 66 - protein, 176 aa, Vaccinia virus
  REGION 1..176: note = J2R (thymidine Kinase) ORF
MNGGHIQLIIGPMFSGKSTELIRRVRRYQIAQYKCVTIKYSNDNYGTGLWTHDKNNFEALEATKLCDVLESITDFSVIGIDEGQFFPDIVEFCERMANEGKIVIVAALDGTFQRKPFNNILNLIPLSEMVVKLTAVCMKCFKEASFSKRLGEETEIEIIGGNDMYQSVCRKCYIDS

SEQ ID NO: 67 - protein, 195 aa, Vaccinia virus
  REGION 1..195: note = Hemagglutinin ORF
MTRLPILLLLISLVYATPFPQTSKKIGDDATLSCNRNNTNDYVVMSAWYKEPNSIILLAAKSDVLYFDNYTKDKISYDSPYDDLVTTITIKSLTARDAGTYVCAFFMTSTTNDTDKVDYEEYSTELIVNTDSESTIDIILSGSTHSPETSSEKPEDIDNFNCSSVFEIATPEPITDNVEDHTDTPSHTLVIALIQ

SEQ ID NO: 68 - DNA, 34 bp, Vaccinia virus
  source 1..34: mol_type = genomic DNA
  misc_feature 1..34: note = 7.5E promoter
aaaagtagaaaatatattctaatttattgcacgg

SEQ ID NO: 69 - DNA, 137 bp, Vaccinia virus
  source 1..137: mol_type = genomic DNA
  misc_feature 1..137: note = 7.5 E/L promoter
ggtagttgcgatatacataaactgatcactaattccaaacccacccgctttttatagtaagtttttcacccataaataataaatacaataattaatttctcgtaaaagtagaaaatatattctaatttattgcacgg

SEQ ID NO: 70 - DNA, 39 bp, Vaccinia virus
  source 1..39: mol_type = genomic DNA
  misc_feature 1..39: note = 11KL promoter
tagtagaatttcattttgtttttttctatgctataaata

SEQ ID NO: 71 - DNA, 32 bp, Vaccinia virus
  source 1..32: mol_type = genomic DNA
  misc_feature 1..32: note = SSL promoter
ttttttttttttttttttttggcatataaata

SEQ ID NO: 72 - DNA, 88 bp, Vaccinia virus
  source 1..88: mol_type = genomic DNA
  misc_feature 1..88: note = LEO promoter
ttttattttttttttttggaatataaatatccggtaaaattgaaaaaatatacactaattagcgtctcgtttcagacgctagctcgag

SEQ ID NO: 73 - DNA, 366 bp, Vaccinia virus
  source 1..366: mol_type = genomic DNA
  misc_feature 1..366: note = ORF 038 (K5L) of IHDW1
ctaaaacatcgctaatctcattgtttgttccctggagtatgagagtcggggggtgttaatcttggaaattatttttctaaccttgttggtagccttcaagacctgactagcaaatccagccttaattttttcatgattgattaatgggtcgtattggtatttataaactttatccatatctctagatactgattctggacatagctttccgactggcgcatttggtgtgatggttcccataagtttggcagctagcagattcagttttgaaacagcatctgcattaactagaggagacattagaatcattgctgtaaacaagtttggattatcgtaagaggctagtatagaaattgttgctcccat

SEQ ID NO: 74 - protein, 121 aa, Vaccinia virus
  REGION 1..121: note = Amino acids of ORF 038 (K5L) of IHDW1
MGATISILASYDNPNLFTAMILMSPLVNADAVSKLNLLAAKLMGTITPNAPVGKLCPESVSRDMDKVYKYQYDPLINHEKIKAGFASQVLKATNKVRKIISKINTPRLSYSREQTMRLAMF

SEQ ID NO: 75 - DNA, 588 bp, Vaccinia virus
  source 1..588: mol_type = genomic DNA
  misc_feature 1..588: note = ORF182 (A56R) of IHDW1
atgacacgattaccaatacttttgttactaatatcattagtatacgctacaccttttcctcagacatctaaaaaaataggtgatgatgcaactctatcatgtaatcgaaataatacaaatgactacgttgttatgagtgcttggtataaggagcccaattccattattcttttagctgctaaaagcgacgtcttgtattttgataattataccaaggataaaatatcttacgactctccatacgatgatctagttacaactatcacaattaaatcattgactgctagagatgccggtacttatgtatgtgcattctttatgacatcaactacaaatgacactgataaagtagattatgaagaatactccacagagttgattgtaaatacagatagtgaatcgactatagacataatactatctggatctacacattcaccagaaactagttctgagaaaccagaggatatagataattttaattgctcgtcggtattcgaaatcgcgactccggaaccaattactgataatgtagaagatcatacagacacaccgtcacatacactagtgatagcattaatacagtaa

SEQ ID NO: 76 - protein, 195 aa, Vaccinia virus; identical to SEQ ID NO: 67
  REGION 1..195: note = Amino acids of ORF182 (A56R) of IHDW1

SEQ ID NO: 77 - DNA, 11 bp, Vaccinia virus
  source 1..11: mol_type = genomic DNA
  misc_feature 1..11: note = Positions 106870 to 106880 of SEQ ID NO: 1
cacttatatat

SEQ ID NO: 78 - DNA, 10 bp, Vaccinia virus
  source 1..10: mol_type = genomic DNA
  misc_feature 1..10: note = Positions 111267 to 111276 of SEQ ID NO: 1
gttttcatta

SEQ ID NO: 79 - DNA, 10 bp, Vaccinia virus
  source 1..10: mol_type = genomic DNA
  misc_feature 1..10: note = Positions 165844 to 185853 of SEQ ID NO: 1
tacagacacc

SEQ ID NO: 80 - DNA, 196002 bp, Vaccinia virus
  source 1..196002: mol_type = genomic DNA
  misc_feature 1..196002: note = VIR100
atcaaagagagaaagagaataaaaatatttttgtaaaactttttttatgagaccatcaaagagagaaagagaataaaaatatttttgtaaaactttttttatgagaccatcagaaagaggtttaatatttttgtgataccctgaaaggaaataggaataggaataggaatagtgtcataatcgtatcacactattgagacagaaaaagaagaagtcgcgagaggtaactttttgtgaatgtagttaagaacatttttgttttgcaaaccggaatatagtgtccggtacacttttttaattcgtggtgtgcctgaatcgttcgattaaccctactcatccaatttcagatgaatagagttatcgattcagacacacgctttgagttttgttgaatcgatgagtgaagtatcatcggttgcaccttcagatgccgatccgtcgacatacttgaatccatccttgacctcaagttcagatgattccttgcacatgtctccgatacgaacgctaaactctagattcttgacacattttgtatcgacgatcgttgaaccgatgatatcttcgtaactcactttcttatgagagatgttagacccgagtactggatgggtcttgatgtcgctgtctttctcttcttcgctacatctgatgtcgatagacacctcacagtctttgatcatagcaagagcttcttcatgagtgatcgcgggagagtccttaccttgtcctggggacacgctggacaatctagcattcactgtgtttccatcagcggattctgagatggatttaatctgaggacatttggtgaatccaaagttcattctcagacctccaccgatgatggagtaataagtggtaggaggatctacatcctcgactgatgtggaatcatcttctgattccacctcgggatttggatctgactcggactctgtaatttccgttacggattggcaaatcttatcattggtcggtgtttggtcttgctttgtgactttgataataacatcgattcccatatgatgtttgttttcttcttccgtacacgaggatgaggatgaggatgattgctgaagactggcaggcacatgcatgccaggacgatatattgtttcataattgctattgattgagtactgttctttatgattctacttccttaccatgcaataaattagaatatattttctacttttacgagaaattaattattgtatttattatttatgggtgaaaaacttactataaaaagcgggtgggtttggaattagtgatcagtttatgtatatcgcaactaccgggcatatggctatcgacatcgagaacattacccacatgataagagattgtatcagtttcgtagtcttgagtattggtattactatatagtatatagatgtcgacgctagatatacagtcgcccactagagttactgtctccgaatgcggcatgataccgtcatcattctttgctttcgttaactgtttggaggaagaatctttgttattgcatttaatctcgaaattcagagtgcacacctttctcctgtaaagaaacctgaagttgctaccttattaaggacagagaagtattcctcacgaaatacgggattacagtctttatgattcatagtaatagttagttccgacgttgagatggattcactgagaccggtagtggtcgtccgagtacacgacgtgtcgttgacgggatacagattaatttccacatcgatatagttaaaggtattactgggtacgggttcgcatttatctgcggaagagacggtgtgagaatatgttccgagaccacacggagaacagatgacgtctccggatactccgtatcctattccacattttgtttgggaaacacatgccttgcatccggatgatcctttgagaagacaataatatccgggagagcattcacagattctattgtgagtcgtgttacacgatcgcgtcttccgttacaacttagacaagcgggtaaatgattattgcgagatgtgaaggtacccgaaccacagggtgtacatcgtgtgttagtcttgctatcgcataatctggaagcgtatgttcccggacacaaattatggcgtttgtattcgttgtctttacactttccatcggatggtgcatgcggtgctatatctcttccgtttattattatacatgagagaaacaatatatacgagtataatacggacttcatgatttaataatgtagtaatcgtcgtcttgttcctgtttcctacttctccaatcatatagatattttctttctatcatggataatatttgtaatggttctttccgtacaacatactgtttagatgatattgcgcataatttccggaggcaaatacgatagtctagattgaccgatggtagactctaatttattgagtgctttgtcgacgagtttacttttatgctccatcgatagatggcactgttctatgagatcgtcgtacatgggaaatgaaatgtgtctgtccgaatgtatggctttaagatagctgtgataccgtatacaggtcggtgtcggagattcgaatctctttaaggcgacttatgtcacgatgatggaatctatcttatcgaatgatatatttttcataaatacacttttatagtcctcgtttaaacagaatttactatgtagttccgcgaatgactcgtcccttaataggcagtaggctagtatcttttttacgtagtaatcgtcgtagggagagaattctgacatcttgtagaacaacgatttaatcataggtagagatactttcagtctgtggtggatgatgtcattcacaacatccgccttgtatatgatgtttctgttttcaaacaccaagtcgaataccgtctttagtcggaaggttgatgtcgtatccgatgtatgaggcaacattgttgttacaattttgaaaggcggtattatagtattcgtctttctgaatgtcgaacctatctagtagataccgtagtatattgagagtgtatccttgattatgttttatgaatagataaagtagatgttgtccttcttccttttgttcgtgccaattgagtaacattatgagaatatgacctgttgcacaatcgttccatgatgggtgtacaatcaagattattacgtatcctcgtatcggctcctcgagataaaagagcatacaccacacgaggactatgtttggtatactgttgaaggtaagtgtgtaaccgcgttaatgtttgctccataatctattatcgcgtagatgaatcgcttctcggctcgcatcttagtgtgacttaacttgtaataattgcttttgtagaacgtggatatgtgtttacagtagtaatgaagagaagtgagtccatcctcgtcgacgcaattagggtcggatcctttgtacagaacgtaatagtttaagctcccattgaatttatatctaagataacacagcaatagatcggatgatttactaaagtcatcaatggtgtccgttagtatatcaaagatcttgttatcgattgatagtgaatgaatcagatagtggtgtagaggaatatgtcctttttcatccttgctatcaaagttacgcatgccgtggtgtaacaatatctttaatacagatggattaaatcgtgtattcatcgtatagcaatgtaatggagagttacctcgtttattcagatcgcagtgtttaataactagcttaaacagatgagacgatgtatccacatcaaagaacgtaaaatacatatgacaaacattgttgacagaaacgtgaccttcattcttaccgtcgtccataaatacgttaggtatgtaccacatactgtcgcgaacgatgcgtacaatctcgtccatctcataatgatttactttttcataattaaagatgtgaaagaaaaccgaacaatatatttttttagtaatgtttatgcgagacatataaaataaactccgtgtttatgatgccggtaaatgtttttatcatcttggacggaatcgattttgtaatatgtcatggaaacaaatgaaacaggacattatcgctccatgataaattatttaatggagtaataaagtatctccatgggtaatttcgaaatcaagttatcgtctgtattaatgttgtccactatggagtcgatcctctcattgttctttacagtttctgtaatgatggacgttagttcttttttgtaccatttgatgtcggattctttgcgtatctcaatctgtggcgtttgcttcgtttaaataatatatcaaacatggagacgcctgatatgtaggcattcttcattctattaatgtctactctatagcgctttagttccttatgacgaccggagatatcatacttactttagaaggaaaatcatcatctaggattaaggcgtatctgatacaggcgaataatggttcaggatatagatagcgtatatctctattaaatgcgtcaatcatagtctctagagtgggatggtagctaagtaataaatcaactatcctcgttttgttttctcttctgtaactacttttctggatggccgtattgattatcgagcgtgatgttgtaacactcgctccatattccaataaccgctttgcaaattgtatattattgacatcgaccgcgtaatatagtagagttttattctcattatcgatcatatctatattatccatgtacttgcttagtatatcaaatacatctattagtatggtttcataacagtgatacccgcaattattaaatctcgataatatcagaccgtacatacatagacggccattgttcgatacgtgatttacagccatgtgtccattattttccacgataaaccttacgacgtttacatcgacgagattattattaacaaagtagtcgtgcagaggatagttgttgtccgttatctaacatgcatcgaacgaccatatcgccgtaatgtaagtagtttatcaacatggcttgtacgatggattcatcctgttgtctaaatctctttagaatgttatcgatgatgtagtggttatagtctctggaatcgtaagaagtaatactacgcattacgtcgacaagagtatgacgtctctcaataagaagattaacgatttccatgtctacattatatggggttactctaaatcgcttgtttagataatccgcctctaatatagggctgacgtcgtatactctacacgtgtccacatcctttattaataatttaacaatctctatatctatggttgagcaagaccagtagtattggatgggtaaagatcctccttcgtctctgccatggatggaaacattgttattgatcaaacatttaattacatccttggatagagattgagattctctatgagacgatatatagtaatgaagagagttcttacacatatcactgtcgtacatacaggtacgaaatacgtaaccggtgctgtaacattctgatttaagaagccatagcaatacttctggtctcggattaggcgtcgttacgtatatatccaccaatccgagaccattgattgcataattcgtattcttggacggacgtatccgtttatccacaattaggtattttagcagacgtaagtcgatattatccgaagacatatacgaatacagatcgaaatcatttatattcgacttgagttcgttagaggaattcgaatagctggatatcagtagatgcacaatttgagattttacgtatctatgcttactgtatgctcctagcggagttaatccttcgttgtttctacaaagtctctcgactccgcgagagagtaacagtcgaacaatcttaatgtctgtatcgcatttattgaagacgtaacaatgtagcgcattgtttcctcgtctatctatatgttttgataagttgtgacacgtttcaatttctagttttatttttttgtacgtcacatcttcatccagtagacgacatagaatacatgtgcaatccatagctattctggtgctaattattcctatttcacgaaaaatgatgaaggcaatcattcctcataagatgataaaaagtgtagtgagagagcatgaaggagatttagtatttagcagtgcggatatgatccaagagggtgagatagtcgttctcgttcagaatctttcgcagcataagtagtatgtcgatatacttatcgttgaagactcttccagagacgatagctgattgagtacaaagtccaatgattgcacgaagttcttcggcggttttcatggagtcatttctgatgaaacatttaatgatctccacgcaattgtcgatattgtcccacggaagtgaatccttcaactcaccaccaaagagctccgttgcatcagttctgaaagagatgagaagcctgtagagagaccctgcgctttctctatgggtccatctatgagaaacccacaggatgtattcagtcagacaatgtctgacgtcggccacggtattcagggagtccttagtagcgtggcaatgacagggtctgaactgggcacaaggagaggccattgtaaaggtagacctgtagccgtttatgctaatagagggctttaatttccatttttttaatgggttgtggatgaggaatgagagtgatatcatattgagatacgtagttatgtagaggtgtatttcctatattatttactttcggtttcatattttaccaactctttaataaatttcttttcacgatgcatcttattaaatgacgttttctcataagtggacatatagatgcagaagtaatgaagaaaagtattacctctatcatctacataattagggtctgctcctttttttaacaacttatacagtacgtagtagtagtttatcggttttaaatcaagtctagaatatatagtggattaatatatttttatattagctaaagctatctatactatcagaaagcatatcattctcaacttcatcatgagttaaatatttgtgtaatggatgtcatgaacattaaacgtattcatgacatactcctttaataggttttttaaaacagatgattcaaatccttcattcattagataacagtgtaacggagtcgtaccttctactagtttgtttatatcacagcattctacaaacagtctaaacaatagagaagacggacagactttaacgtataaatgacacatgttatcgatattcgttgatgaattattattaaacgtagttatgataaatgattctaacgacatctctcgctagagataaaatctagtatcgtatcattaaacatctttgcatcatactcgcatagcatagtttttcataattaatacaatatttaaaagacttattcggaaagtattttaatacatgtatcatcgatggagatccatatgaggagtcacttgtagttcttcagtagtaataacagtgctatcatcgatagtataattatatgtagaaggttcatatgttgttgtaattggagtaactgttggtagttcttccgtggaatcaataattatactaacagcaatagtataattatataaatatgttccgttgatatcacatattttaatgaactcatttctaacaccctcagctatatctgtccaattaaatgtagccaacaatctactacgttctctttgattgactacttgtacggtagcgacgctacactatctttattgtcttctacatgctccaattgaatgtcatgatacaacgcagtttttcttatgcatgtttcataacaccacgaacatgtcgcagtaagatatatagccagagataatttctgtaaattcatgattgccggtcataaacaagcccgtcaataattgtggctatatattcagtttatagagcaaaataattaagcacaatagcgcttaatctcaaaatatgttatgtttatttttttcatattaaacatactggttaaaatcctctaaaggctgatcttcatctataaatcaagatcataattacatttagacagtggtttcatgtttataaaaatgttctttttgtgtgaataaggaatatactaatcaataatcaaccatcgaccccattacgatagtatgcaggcaaccccccattagagaggtacgtgtaatcagtctctccagttttagtatttttataagtcattgttacataaacggcttttaaacagtctcctcgataataagccatatctggaaatttattaaatactcgagtcattttacgcacggtcaaaaaagtaagtaatgtcgacgacttcttacattctatagaaacacctagaatactcattttcttttggaaaatatcctcagactctgatttgaacaatgcacgacctatagtaaaccgtgaccaataagttatattagtcaatggtatatccaaaccatcaggtgtggatagtacgccgatagtccagtctttggtatcgatagtgtagttattgaactgagaagttaccgtatagtctttttggtcatctctaaacaaggaaactaatacctctacactattgaacgatttatcttccgtaatgggtggaataacgggaatataaagtggactagcgatggatgaagtcacgaatataagacacgctattaatccgtatatcatcattttgatattacttataataacgatttgtttaatttttagtttatactattaattgtaaatgatattattatttttttaagtattatcagctttagtttatactattactatttgtaatatttagacatagataaacgtgataaaagtctatttgtttatatttattgcggatagcagtatttccctataaaaagtatacgtcctgtgttgtctttaatcatgtacatgaatggatggtttatgtagaccttcgtacgatataccatcgaaaagttagtcataaatactcctgtaacggccgatgcttctgtatactcctcattaacatctataaacgtcgtatgtagaaatttttctacagtgatagtttcattacacatcttgctaaaatctgcataatatccgaatatattagtaagtcctaaattttctaaaatcggtaccagattatacggttctgtcatttccactttaaactttggcatatacaagtctatacttttagtagataacataccacaccattttttaaatttttcatctgttatatttttttctatgttatatataccttctatgtcgtccggtagtataattaccatactagagtttccctcgtatggaatatcgataatagagaatcctccgaataattcattaatatgtacatattgcaagttattctcggtacccaccatcatatcaacactggtaactatattcttagaaatataaaacttgtctgtatatgtaagatgtttagaaaatggatatttccacattgctttaaaatggacggcgctaacaactgtcatacgagtattaatggatagcggactagtcaataaggaattaattttaccatttgtcatcgtcttaacccattcgttgattagttcctttgtttggttagcattattaaagtttacagtttgaaaatcgtcttttattttttgtaggaaggaggcgtggaactcgatactatcgctaccgtatattttatttgcggtagctagtgtcgcacaatacggaatatctacgtccatgtcattattgtcatccttcttatcatcgggtgtattctcattcatattctctatatattttgatagttgttcagctgtagaaccagctgctccatgatttagaatagataaagtagataaaatagaaactggagaaatcaaaacattttcatcagggtgttttaagattagttctttaaagatatccatggtatagaccaaacaataacgataacgatatatatcataaataaataatgttaaatttcagtttatgtttgtaccccgtattcatacttaacaaattggtattgcgtacacaatcaatcatattacataccattaataatgcaagcataaaaaatcgttagtagatgtttctaaatataggttccgtaagcaaagaatataagaatgaagcggtaatgataaaatcaatcgttatctaaaatgatcatactcatttattttattctattatattaacacatacatttttaacagcaacacattcaatattgtattgttatttttatattatttacacaattaacaatatattattagtttatattactgaattaataatataaaattcccaatcttgtcataaacacacactgagaaacagcataaacacaaaatccatcaaaaatgtcgatgaaatatctgatgttgttgttcgctgctatgataatcagatcattcgccgatagtggtaacgctatcgaaacgacattgccagaaattacaaacgctacaacagatattccagctatcagattatgcggtccagagggagatggatattgtttacacggtgactgtatccacgctagagatatcgacggtatgtattgtagatgctctcatggttatacaggcattagatgtcagcatgtagtattagtagactatcaacgttcagaaaaaccaaacactacaacgtcatatatcccatctcccggtattgtgcttgtattagtaggcattattattatgtgttgtctattatctgtttataggttcactcgaagaactaataaactacctctacaagatatggttgtgccataatttttataaatttttttatgagtatttttacaaaaaaaatgtataaagtgtatgtcttatgtatatttataaaaatgctaagtatgcgatgtatctatgttatttgtatttatctaaacaatacctctacctctagatattatacaaaaattttttatttcggcatattaaagtaaaatctagttaccttgaaaatgaatacagtgggtggttccgtatcaccagtaagaacataatagtcgaatacagtatccgattgagattttgcatacaatactagtctagaaagaaatttgtaatcattttctgtgacgggagtccatatatctgtatcatcgtctagtttatcagtgtcccatgctatatttctgttatcatcattagttaatgaaaataactctcgtgcttcagaaaagtcaaatattgtatccatacatacatctccaaaactatcgcttatacgtttatctttaacgatacctatacctagatggttatttactaacagacattttccagatctattgactataactcctatagtttccacatcaaccaagtaatgatcatctattgttatataacaataacataactcttttccatttttatcagtatgtatatctatatcaacgtcgtcgttgtagtgaatagtagtcattgatctattatatgaaacggatatgtctagaacggcaattgtcttacgtccagttaacactttcgttgatttaaagtctagagtctttgcaaacataatatccttatccgactttatatttcctgtagggtggtataattttattttgcctccacatatcggtgtttccaaatatattactagacaatattccatatagttattagttaagggtacccaattagaacacgtacgcttattatcatcatttggatcgtatttcataaaagttattgtactatcgatgtcaacacattctacattttttaatcgtctatatagtatttttctgatattttctataatatcagaattgtcttccatcggaagttgtatactatcggaatcagttacatgtttaaataattctctgatgtcattccttatacaatcaaattcattattaaacagtttaatagtctgtagacctttatcgtcgtaaatatccattgtcttattagttacgcttatttttatgtgttttacgttgctttattatattttataagaatgattgtttgacgaatcacgagaactattaagacacattattaggtatatattataaaaaagtttttgattacgatgttataagaggaaagaggacacattaacatcatacatcaattaactacattcttataacatcgtaatcaaaagaattgcaattttgatgtataacaactgtcaatgggttatggaattgtatattacatattatacggtatgttggtaacgacaaataccgatcggtaatcgtttgccggtgtaatagaattatatatatctatctattacaccggctgagtatacataataataagttgtggtagtatgatctccatatttataatttaggactttgtattcagtatttttggaatcataaaaaataaaaaaaagttttactaatttaaaatttaaaaagtatttacatttttttcactgtttagtcgcggatatggaattcgatcctgccaaaatcaatacatcatctatagatcatgtaacaatattacaatacatagatgaaccaaatgatataagactaacagtatgcattatccgaaatattaataacattacatattatatcaatatcacaaaaataaatacacatttggctaatcaatttcgggcttggaaaaaacgtatcgccggaagggactatatgactaacttatctagagatacaggaatacaacaatcaaaacttactgaaactatacgtaactgtcaaaaaaatagaaacatatatggtctatatatacactacaatttagttattaatgtggttattgattggataaccgatgtgattgttcaatcaatattaagagggttggtaaattggtacatagctaataatacctatactccaaatacacccaataatacaacaaccatttctgagttggatatcatcaaaatactaaataaatacgaggacgtgtatagagtaagtaaagaaaaagaatgtggaatttgctatgaagttgtttactcaaaacgattagaaaacgatagatactttggtttattggattcgtgtactcatatattttgcataacatgcatcaatatatggcataaaacacgaagagaaaccggtgcgtcggataattgtcctatatgtcgtacccgttttagaaacataacaatgagcaagttctataagctagttaactaataaataaaaagtttaatttgttgacgacgtatgtcgttattttttctcgtataaaagattaatttgattctaatataatctttagtattggataaatatcaattcaaattaattccattagattatatcataaataaaaatagtagcacgcactacttcagccaaatattcttttttgaaacgccatctatcgtagtgaggacacaagtgaacctataatgagcaaatttattagtatcggttacatgaaggactttacgtagagtggtgattccactatctgtggtacgaacggtttcatcttctttgatgccatcacccagatgttctataaacttggtatcctcgtccgatttcatatcctttgccaaccaatacatatagctaaactcaggcatatgttccacacatcctgaacaatgaaattctccagaagatgttacaatgtctagatttggacatttggtttcaaccgcgttaacatatgagtgaacacacccatacatgaaagcgatgagaaataggattttcatcttgccaaaatatcactagaaaaaatttatttatcaattttaaaggtataaaaaatacttattgttgctcgaatattttgtatttgatggtatacggaagattagaaatgtaggtattatcatcaactgattctatggttttatgtattctatcatgtttcactattgcgttggaaataatatcatatgcttccacatatattttattttgttttaactcataatactcacgtaattctggattattggcatatctgtgaataattttagctccatgatcagtaaatattaatgagaacatagtattaccacctaccattatttttttcatttcgttcaattcttgattgcaaagatctatataatcattatagcgttgacttatggactctggaatcttagacgatgtacagtcatctataatcatggcatatttaatacattgttttatagcatagtagttatctacgatgttagatatttctctcaatgaatcaatcacacaatctaatgtaggtttatgacataatagcattttcagcagttcaatgtttctagattcgttgatggcaatggctatacatgtatatccgttatttgatctaatgttgacatctgaaccggattctagcagtaaagatactagagattgtttattatatctaacagccttgtgaagaagtgtttctcctcgtttgtcaatcatgttaatgtctttaagataaggtaggcaaatgtttatagtactaagaattgggcaagcataagacatgtcacaaagaccctttttgtatgtataagtgtagaaattataacatccatagttggatttacataggtgtccaatcgggatctctccatcatcgagatgattgacggcatctcccccttccttttttagtagatatttcatcgtgtaagaatcaatattaatatttctaaagtatccgtgtatagcctctttatttaccacagctccatattccaacatgcattccactaaagggatatcgatatcgccgaatgtcatatactcaattagtatatgttggaggacatccgagttcattgttttcaatatcaaagagatggtttccttatcatttctccatagtggtacaatactacacattattccgtgaggctttccattctccaaaaacaatttgaccaaatctacatctttattgtatctataatcactatttagataatcagccataattcctcgagtgcaacatgttagatcgtctatatatgaataagccgtgttatctattcctttcattaacaatttaacgatgtctatatctatatgagatgacttaatataatattgaagagctgtacaatagtttttatctatagaagacggcttgattccgtgattaattagacatttaacaacttccggacgcacatatgctctcgtatccgactctgaatacagatgagagatgatatacagatgcaatacggtaccgcaatttcgtagttgataatcatcatacgcgtatccgtactcgtcctcataaagaacactgcagccattttctatgaacaaatcaataattttaggaacaggatcattgtcattacataattttctataactgaacgatggttttcacatttaacactcaagtcaaatccatgttctaccaacacctttatcaagtcaacgtctacatttttggatttcatatagctgaatatattaaagtcatttatgttgctaaatccagtggcttctagtagagccatcgctatatcctttaactttaacatgtctactatttgtgtattcttctaatggggtagctgtctccaatttttgcgtaatggattagtgccactgtctagtagtagtttgacgacctcgacattattacaatgctcattaaaaaggtatgcgtgtaaagcattattcttgaattggttcctggtatcattaggatctctgtctctcaacatctgtttaagttcatcgagagccacctcctcattttccaaatagtcaaacattttgactgaatagaagtgaatgagctactgtgaactctatacacccacacaactaatgtcattaaatattatttttttgaatgtatttataccatgtcaaaaacttgtacaattattaataaaaataatttagtgtttaaattttaccagttccagattttacacctccgttaaccccactttttacaccactggacgaccctcctccccacattccaccgccaccagatgtataagttttagatcctttattactaccatcatgtccatggataaagacactccacatgccgccactaccccctttagaagacatattaataagacttaagagttaaggacaagtttaacaataaaattaatcacgagtaccctactaccaacctacactattatatgattatagtttctatttttacagtaccttaactaaagtttctagtcacaagagcaatactaccaacctacactattatatgattatagtttctatttttataggaacgcgtacgagaaaatcaaatgtctaatttctaacggtagtgttgataaacgattatcgtcaatggatacctcctctatcatgtcgtctattttcttactttgttctattaacttattagcattatatattatttgattataaaacttatattgcttattagcccaatctgtaaatatcggattattaacatatcgtttctttgtaggtttatttaacttgtacatcactgtaagcatgtccgtaccatttattttaatttgacgcatatccgcaatttctttttcgcagtcggttataaattctatatatgatggatacatgctacatgtgtacttataatcgactaatatgaagtacttgatacatattttcagtaacgatttattattaccacctatgaataagtacctgtgatcgtctaggtaatcaactgttttcttaatacattcgatggttggtaatttactcagaataatttccaatatcttaatatataattctgctatttctggaatatatttatctgccagtataacacaaatagtaatacatgtaaacccatattttgttattatattaatgtctgcgccattatctattaaccattctactaggctgacactatgcgacttaatacaatgataaagtatactacatccatgtttatctattttgtttatatcatcaatatacggcttacaaagttttagtatcgataacacatccaactcacgcatagagaaggtagggaataatggcataatatttattaggttatcatcattgtcattatctacaactaagtttccattttttaaaatatactcgacaactttaggatctctattgccaaatttttgaaaatatttatttatatgcttaaatctatataatgtagctccttcatcaatcatacatttaataacattgatgtatactgtatgataagatacatattctaacaatagatcttgtatagaatctgtatatcttttaagaattgtggatattaggatattattacgtaaactattacacaattctaaaatataaaacgtatcacggtcgaataatagttgatcaactatataattatcgattttgtgatttttcttcctaaactgtttacgtaaatagttagatagaatattcattagttcatgaccactatagttactatcgaataacgcgtcaaatatttcccgtttaatatcgcatttgtcaagataataatagagtgtggtatgttcacgataagtataataacgcatctctttttcgtgtgaaattaaatagtttatcacgtccaaagatgtagcataaccatcttgtgacctagtaataatataataatagagaactgttttacccattctatcatcataatcagtggtgtagtcgtaatcgtaatcgtctaattcatcatcccaattataatattcaccagcacgtctaatctgttctattttgatcttgtatccatactgtatgttgctacatgtaggtattcctttatccaataatagtttaaacacatctacattgggatttgatgttgtagcgtatttctctacaatattaataccatttttgatactatttatttctatacctttcgaaattagtaatttcaataagtctatatcgatgttatcagaacatagatattcgaatatatcaaaatcattgatatttttatagtcgactgacgacaataacaaaatcacaacatcgtttttgatattattatttttcttggtaacgtatgcctttaatggagtttcaccatcatactcatataatggatttgcaccactttctatcaatgattgtgcactgctggcatcgatgttaaatgttttacaactatcatagagtatcttatcgttaaccatgattggttgttgatgctatcgcattttttggtttctttcatttcagttatgtatggatttagcacgtttgggaagcataagctcatatgatttcagtactgtagtgtcagtactattagtttcgatcagatcaatgtctagatctatagaatcaaaacacgataggtcagaagataatgaatatctgtaggcttcttgttgtactgtaacttctcgttttgttagatggttgcatcgtgctttaacatcaatggtacaaattttatcctcgctttgtgtatcatattcgtccctactataaaattgtatattcagattatcatgagatgtgtatacgctaacggtatcaataaacggagcacaccatttagtcataaccgtaatccaaaaatttttaaagtatatcttaacgaaagaagttgtgtcattgtctacggtgtatggtactagatcctcataagtgtatatatctagagtaatgtttaatttatcaaatggttgataatatggatcctcatggcaatttcctaagacgaaaataagacataaacacgcaataaatctaattgcggacatggttactccttaaaaaaatactaataatcaccttggctatttagtaagtgtcatttaacactatactcatattaatccatggactcataatctctatacgggattaacggatgttctatatacggggatgagtagttctcttctttaactttatactttttactaatcatatttagactgatgtatgggtaatagtgtttgaagagctcgttctcatcatcagaataaatcaatatctctgtttttttgttatacagatgtattacagcctcatatattacgtaatagaacgtgtcatctaccttattaactttcaccgcatagttgtttgcaaatacggttaatcctttgacctcgtcgatttccgaccaatctgggcgtataatgaatctaaactttaatttcttgtaatcattcgaaataatttttagtttgcatccgtagttatcccctttatgtaactgtaaatttctcaacgcgatatctccattaataatgatgtcgaattcgtgctgtatacccatactgaatggatgaacgaataccgacggcgttaatagtaatttactttttcatctttacatattgggtactagttttactatcataagtttataaattccacaagctactatggaataagccaaccatcttagtataacacacatgtcttaaagtttattaattaattacatgttgttttatatatcgctacgaatttaaacagagaaatcagtttaggaaaaaaaattatctatctacatcatcacgtctctgtattctacgatagagtgctactttaagatgagacatatccgtgtcatcaaaaatatactccattaaaatgattattccggcagcgaacttgatattggatatatcacaacctttgttaatatctacgacaatagacagcagtcccatggttccataaacagtgagtttatctttctttgaagagatattttgtagagatcttataaaactgtcgaatgacatcgcatttatatctttagctaaatcgtatatgttaccatcgtaatatctaaccgcgtctatcttaaacgtttccatcgctttaaagacgtttccgatagatggtctcatttcatcagtcatactgagccaacaaatataatcgtgtataacatctttgatagaatcagactctaaagaaaacgaatcggctttattatacgcattcatgataaacttaatgaaaaatgtttttcgttgtttaagttggatgaatagtatgtcttaataattgttattatttcattaattaatatttagtaacgagtacactctataaaaacgagaatgacataactaatcataactagttatcaaagtgtctaggacgcgtaattttcatatggtatagatcctgtaagcattgtctgtattctggagctattttctctatcgcattagtgagttcagaatatgttataaatttaaatcgaataacgaacataactttagtaaagtcgtctatattaactcttttattttctagccatcgtaataccatgtttaagatagtatattctctagttactacgatctcatcgttgtctagaatatcacatactgaatctacatccaattttagaaattggtctgtgttacatatctcttctatattattgttgatgtattgtcgtagaaaactattacgtagaccattttctttataaaacgaatatatagtactccaattatctttaccgatatatttgcacacataatccattctctcaatcactacatctttaagattttcgttgttaagatatttggctaaactatataattctattagatcatcaacagaatcagtatatatttttctagatccaaagacgaactctttggcgtcctctataatattcccagaaaagatattttcgtgttttagtttatcgagatctgatctgttcatatacgccatgattgtacggtacgttatgataaccgcataaaataaaaatccattttcatttttaaccaatactattcataattgagattgatgtaatactttgttactttgaacgtaaagacagtacacggatccgtatctccaacaagcacgtagtaatcaaatttggtgttgttaaacttcgcaatatttatcaatttagatagaaacttatactcatcatctgttttaggaatccatgtattattaccactttccaacttatcattatcccaggctatgtttcgtccatcatcgttgcgcagagtgaataattcttttgtattcggtagttcaaatatataatccatgcatagatcggtaaagctattgtagatgtgatttttcctaaatctaatataaaactcgtttactagcaaacactttcctgatttatcgaccaagacacatatggtttctaaatctatcaagtggtggggatccatagttatgacgcagtaacatagattattaccttcttaactgtcgctaatatctatatatttattgttatcgtattggattctgcatatagatggcttgtatgtcaaagatatagaacacataaccaatttatagtcgcgctttacattctcgaatctaaagttaagagatttagaaaacattatatcctcggatgatgttatcactgtttctggagtaggatatattaaagtctttacagatttcgtccgattcaaataaatcactaaataatatcccacattatcatctgttagagtagtatcattaaatctattatattttatgaaagatatatcactgctcacctctatatttcgtacatttttaaactgtttgtataatatctctctgatacaatcagatatatctattgtgtcggtagacgataccgttacatttgaattaatggtgttccattttacaacttttaacaagttgaccaattcatttctaatagtatcaaacgctccatgattaaatattttaatagtatccattttatatcactacggacacaaagtagctgacataaaccattgtataatttttatgttttatgtttattagcgtacacattttggaagttccggcttccatgtatttcctggagagcaagtagatgatgaggaaccagataggttatatccgtacttgcacttaaagtttacattgtcgttgtatgagtatgatcttttaaacccgctagacaagtatccgtttgatattgtaggatgtggacatttaacaatctgacacgtgggtggatcggaccattctcctcctgaacacaggacaccagagttaccaatcaacgaatatccactattgcaactataagttacaacgcttccatcggtataaaaatcctcgtatccgttatgtcttccgttggatatagatggaggggattggcatttaacagattcacaaataggtgcctcgggattccataccatagatccagtagatcctaattcacaatacgatttagattcaccgatcaaatgatatccgctattacaagagtacgttatactagagccaaagtctactccgccaatatcaagttggccattatcgatatctcgaggcgatgggcatctccgtttaatacattgattaaagagtgtccatccagtacctgtacatttagcatatataggtcccattttttgctttctgtatccaggtagacatagatattctatagtgtctcctatgttgtaattagcattagcatcagtctccacactattcttaaatttcatattaatgggtcgtgacggaatagtacagcatgatagaacgcatcctattcccaacaatgtcaggaacgtcacgctctccaccttcatatttatttatccgtaaaaatgttatcctggacatcgtacaaataataaaaagcccatatatgttcgctattgtagaaattgtttttcacagttgctcaaaaacgatggcagtgacttatgagttacgttacactttggagtctcatctttagtaaacatatcataatattcgatattacgagttgacatatcgaacaaattccaagtatttgattttggataatattcgtattttgcatctgctataattaagatataatcaccgcaagaacacacgaacatctttcctacatggttaaagtacatgtacaattctatccatttgtcttccttaactatatatttgtatagataattacgagtctcgtgagtaattccagtaattacatagatgtcgccgtcgtactctacagcataaactatactatgatgtctaggcatgggagacttttttatccaacgatttttagtgaaacattccacatcgtttaatactacatatttttcatacgtggtataaactccacccattacatatatatcatcgtttacgaataccgacgcgcctgaatatctaggagtaattaagtttggaagtcttatccatttcgaagtgccgtgtttcaaatattctgccacacccgttgaaatagaaaattctaatcctcctattacatataactttccattgttaacacaagtactaacttctgattttaacgacgacatattagtaaccgttttccattttttcgtttcaagatctacccgcgatacggaataaacatgtctattgttaatcatgccgccaataatgtatagacaattatgtaaaacatttgcattatagaattgtctatctgtattaccgactatcgtccaatattctgttctaggagagtaatgggttattgtggatatataatcagagtttttaatgactactatattatgttttataccatttcgtgtcactggctttgtagatttggatatagttaatcccaacaatgatatagcattgcgcatagtattagtcataaacttgggatgtaaaatgttgatgatatctacatcgtttggatttttatgtatccactttaataatatcatagctgtaacatcctcatgatttacgttaacgtcttcgtgggataagatagttgtcagttcatcctttgataattttccaaattctggatcggatgtcaccgcagtaatattgttgattatttctgacatcgacgcattatatagttttttaattccatatcttttagaaaagttaaacatccttatacaatttgtggaattaatattatgaatcatagtttttacacatagatctactacaggcggaacatcaattattatggcagcaactagtatcatttctacattgtttatggtgatgtttatcttcttccagcgcatatagtctaatagcgattcaaacgcgtgatagtttataccattcaatataatcgcttcatcctttagatggtgatcctgaatgcgtttaaaaaaattatacggagatgccgtaataatttccttattcacttgtataatttccccattgatagaaaatatcacgctttccattcttgaagtactataagtaattatagtataatgtaaaggtttatatattcaatattttttataaaaaaatcatttcgacattaattcctttttaaatttccgtctatcatctatagaaacatattctatgaatttataaaatgcttttacgtgtcctatcgtaggcgatagaaccgctaaaaagcctattgaatttctacaaaagaatctattatatggtatagggagagtataaaacattaaatgcccgtacttattaaagtattcagtagccaatcctaactctttcgaatacttattaatggctcttgttctgtacgaatctatttttttgaacaacggacctagtggtatatcttgttctatgtatctaaaataatgtctgactagatccgttagtttaatatcctcagtcatcttgtctagaatggcaaatctaactgcgggtttaggctttagtttagtttttatatctacatctatgtctttatctaacaccaaaaatataatagctaatattttattacaatcatccggatattcttctacgatctcactaactaatgtttctttggttatactagtatagtcactatcggacaaataaagaaaatcagatgatcgatgaataatacatttaaattcatcatctgtaagatttttgagatgtctcattaaaatattattagggtcagtactcattatcattaggcagctattacttattttattatttttcaccatatagatcaatcattagatcatcaaaatatgtttcaatcatcctaaagagtatggtgaatgactcttcccatctaatttctgaacgttcaccaatgtctctagccactttggcactaatagcgatcattcgcttagcgtcttctatattattaactggttgattcaatctatctagcaatggaccgtcggacagcgtcattctcatgttcttaatcaatgtacatacatcgccgtcatctaccaattcatccaacaacataagctttttaaaatcatcattataataggtttgatcgttgtcatttctccaaagaatatatctaataagtagagtcctcatgcttagtaatttaactattttagttaacaactattttttatgttaaatcaattagtacaccgctatgtttaatacttattcatattttagtttttaggattgagaatcaatacaaaaattaatgcatcattaattttagaaatacttagtttccacgtagttaatgaaacatttgaactcatcgtacaagacgttctcgtacaggacgtaactataaaccggtttatatttgttcaagatagatacaaatccgataactttttttacgaattctacgggatccactttaaaagtgtcataccgggttctttttatttttttaaacagatcaatggtgtgatgttgattaggtcttttacgaatttgatatagaatagcgtttacatattctccataatggtcaatcgccatttgttcgtatgtcataaattctttaattatatgacactgtgtattgtttagttcatccttgttcattgttaggaatctatccaaaatggcaattatactagaactataggtgcgttgtatacacatattgatgtgtctgtttatacaatccatgatatttggatccatgctactaccttcgggtaaaattgtagcatcatataccatttctagtactttaggttcattattatccattgcagaggacgtcatgatcgcatcctaaaaaaatatattatttttatgttattttgttaaaaataatcatcgaatacttcgtaagatactccttcatgaacataatcagttacaaaacgtttatatgaagtaaagtatctacgatttttacaaaagtccggatgcataagtacaaagtacgcgataaacggaataataatagatttatctagtctatctttttctatagctttcatagttagatacatggtctcagaagtaggattatgtaacatcagcttcgataaaatgactgggttatttagtcttacacattcgctcatacatgtatgaccgttaactacagagtctacactaaaatgattgaacaatagatagtctaccattgtttcgtattcagatagtacagcgtagtacatggcatcttcacaaattatatcattgtctaatagatatttgacgcatcttatggatcccacttcaacagccatcttaaaatcggtaaaatcatattgctttcctttatcattaataatttctaaaacatcatctctatcataaaagatacaaatattaactgtttgatccgtaataacattgctagtcgatagcaatttgttaataagatgcgctgggctcaatgtcttaataagaagtgtaagaggactatctccgaatttgttttgtttattaacatccgttgatggaagtaaaagatctataatgtctacattcttgactgttttagagcatacaatatggagaggtgtatttccatcatgatctggttttgagggactaattcctagtttcatcatccatgagattgtagaagcttttggattgtctgacataagatgtctatgaatatgatttttgccaaatttatccactatcctggcttcgaatccgatggacattatttttttaaacactctttctgaaggatctgtacacgccaacaacggaccacatccttcttcatcaaccgagttgttaatcttggctccatactgtaccaataaatttattctctctatgacttcatcatctgttcccgagagataatatagaggcgttttatgctgtttatcacacgcgtttggatctgcgccgtgcgtcagcagcatcgcgactattctattattattaattttagaagctatatgcaatggataatttccatcatcatccgtctcatttggagagtatcctctatgaagaagttcttcgacaaatcgttcatctagtcctttaattccacaatacgcatgtagaatgtgataattatttccagaaggttcgatagcttgtagcatattcctaaatacatctaaatttttactattatatttggcataaagagatagataatactcggccgacataatgttgtccattgtagtataaaaattaatatttctatttctatttctgtatatttgcaacaatttactctctataacaaatatcataacttagttcttttatgtcaagaaggcactggtttagttcatctataaatgtcacgccataactaccacgcatgctatactcagaattatgataaagatatttatccttggggtgtaggtaatggggattaatctttgttggatcagtctctaagttaacacatgtcacacatgatccatttatagttatatcacacgatgatgatttatgaattgattccggaagatcgctatcgtattttgtggttccacaattcatttccatacatgttattgtcacactaatattatgatgaactttatctagccgctgagtggtaaacaacagaacagatagtttattatctttaccaacaccctcagccgctgccacaaatctctgatccgtatccatgatggtcatgtttatttctagtccgtatccagtcaacactatgttagcatttctgtcgatatagctttcactcatatgacactcaccaataatagtagaattaatgtcgtaatttacaccaatagtgagttcggcggcaaagtaccaataccggtaatcttgtcgaggaggacatatagtattcttgtattctaccgaatacccgagagatgcgatacaaaagagcaagactaatttgtaaaccatcttactcaaaatatgtaacaatagtacgatgcaatgagtaagacaataggaaatctatcttatatacacataattattctatcaattttaccaattagttagtgtaatgttaacaaaaatgtgggagaatctaattagtttttctttacacaattgacgtacatgagtctgagttccttgtttttgctaattatttcatccaatttattattcttgactatatcgagatcttttgtataggagtcagacttgtattcaacatgcttttctataatcattttagctatttcggcatcatccaatagtacattttccagattagcagaatagatattaatgtcgtatttgaacagagcctgtaacatctcaatgtctttattatctatagccaatttaatgtccggaatgaagagaagggaattattggtgtttgtcgacgtcatatagtcgagcaagagaatcatcatatccacgtgtccattttttatagtggtgtgaatacaactaaggagaatagccagatcaaaagtagatggtatttctgaaagaaagtatgatacaatacttacatcattaagcatgacggcatgataaaatgaagttttccatccagttttcccatagaacatcagtctccaatttttcttaacaaacagttttaccgtttgcatgttaccactatcaaccgcataatacaatgcagtgtttcccttgtcatcaaattgtgaatcatccagtccactgaatagcaaaatctttactattttggtatcttccaatgtggctgcctgatgtaatggaaattcattctctagaagatttttcaatgctccagcgttcaacaacgtacatactagacgcacgttattatcagctattgcataatacaaggcactatgtccatggacatccgccttaaatgtatctttactagagagaaagcttttcagctgcttagacttccaagtattaattcgtgacagatccatgtctgaaacgagacgctaattagtgtatattttttcattttttataattttgtcatattgcaccagaattaataatatctctaatagatctgattagtagatacatggctatcgcaaaacaacatatacacatttaataaaaataatatttattaagaaaattcagatttcacgtacccatcaatataaataaaataatgattccttacaccgtacccatattaaggagattccaccttacccataaacaatataaatccagtaatatcatgtctaatgatgaacacaaatggtgtattaaattccagtttttcaggagatgatctcgccgtagctaccataatagtagatgcctctgctacagttccttgttcgtcgacatctatctttgcattctgaaacattttataaatatataatgggtccctagtcatatgtttaaacgacgcattatctggattaaacatactaggagccatcatttcggctatcgacttaatatccctcttattttcgatagaaaatttagggagtttaagattgtacactttattccctaattgaaacgaccaatagtctaattttgcagccgtaatagaatctgtgaaatgggtcatattatcacctattgccaggtacatactaatattagcatccttatacggaaggcgtaccatgtcatattctttgtcatcgattgtgattgtatttccttgcaatttagtaactacgttcatcatgggaaccgttttcgtaccgtacttattagtaaaactagcattgcgtgttttagtgatatcaaacggatattgccatgtacctttaaaatatatagtattaatgattgcccatagagtattattgtcgagcatattagaatctactacattagacataccggatctacgttctactatagaattaattttattaaccgcatctcgtctaaagtttaatctatataggccgaatctatgatattgttgataatacgacggtttaatacacacagtattatctacgaaactttgataagttagatcagtgtacgtatatttagatgttttcagcttagctaatcctgatattaattctgtaaatgctggacccagatctctttttctcaaatccatagtcttcaataattctattctagtattacctgatgcaggcaatagcgacataaacatagaaaacgaatagccaaacggcgagaagacaatattatcatcttgaatatttttatacgctactataccggcattggtaaatccttgcagacgataggtagacgctgaacacgttaacgatagtatcaataacgcaatcatgattttatggtattaataattaaccttatttttatgttcggtataaaaaaattattgatgtctacacatccttttgtaattgacatctatatatccttttgtataatcaactctaatcactttaacttttacagttttccctaccagtttatccctatattcaacatatctatccatatgcatcttaacactctctgccaagatagcttcagagtgaggatagtcaaaaagataaatatatagagcataatccttctcgtatactctgccctttattacatcgcccgcattgggcaacgaataacaaaatgcaagcatcttgttaacgggctcgtaaattgggataaaaattatgtttttatatctattttattcaagagaatattcaggaatttctttttccggttgtatctcgtcgcagtatatatcatttgtacattgtttcatattttttaatagtttacaccttttagtaggactagtatcgtacaattcatagctgtattttgaattccaatcacgcataaaaatatcttccaattgttgacgaagacctaatccatcatccggtgtaatattaatagatgctccacatgtatccgtaaagtaatttcctgtccaatttgaggtacctatataggccgttttatcggttaccatatatttggcatggtttaccctagaatacggaatgggaggatcagcatctggtacaataaatagctttacttctatatctatgtttttagattttagcatagcgatagatcttaaaaagtttctcatgataaacgaagatcgttgccagcaactaatcaatagcttaacggatacttgtctgtctatagcggatcttcttaattcatcttctatataaggccaaaacaaaattttacccgccttcgaataaataatagggataaagttcataacagatacataaacgaatttactcgcatttctaatacatgacaataaagcggttaaatcattggttctttccatagtacatagttgttgcggcgcagaagcaataaatacagagtgtggaacaccacttacgttaatactaagaggatgatctgtattataatacgacggataaaagtttttccaattatatggtagattgttaactccaagataccagtatacctcaaaaatttgagtgagatccgctgccaagttcctattattgaagatcgcaatacccaattctttgacctgagttagtgatctccaatccatgttagcgcttcctaaataaatatgtgtattatcagatatccaaaattttgtatgaagaactcctcctaggatatttgtaatatctatgtatcgtacttcaactccggccatttgtagtctttcaacatcctttaatggtttgttagatttattgacggctactctaactcttactcctcttttgggtaattgtacaatctcgtttaatattatcgtgccgaaattcgtacccacttcatccgataaactccaataaaaagatgatatatctagtgtttttgtggtattggatagaatttccctccacatgttaaatgtagacaaatatactttatcaaattgcatacctataggaatagtctctgtaatcactgcgattgtattatccggattcattttatttgttaaaaaataatcctatatcacttcactctattaaaaatccaagtttctatttctttcatgactgattttttaacttcatccgtttccttatgaagatgatgtttggcaccttcataaatttttatttctctattacaatttgcatgttgcatgaaataatatgcacctaaaacatcgctaatctcattgtttgttccctggagtatgagagtcgggggggtgttaatcttggaaattatttttctaaccttgttggtagccttcaagacctgactagcaaatccagccttaattttttcatgattgattaatgggtcgtattggtatttataaactttatccatatctctagatactgattctggacatagctttccgactggcgcatttggtgtgatggttcccataagtttggcagctagcagattcagttttgaaacagcatctgcattaactagaggagacattagaatcattgctgtaaacaagtttggattatcgtaagaggctagtatagaaattgttgctcccatggaatgacccaataagtagatttaatagttaccacgtgctgtaccaaagtcatcaatcatcattttttcaccattacttcttccatgtccaatatgatcatgtgagaatactaaaattcctaacgatgatatgttttcagctagttcgtcataacgtccagaatgtttaccagctccatgacttatgaatactaatgccttaggatatgtaataggtttccaatatttacaatatatgtaatcattgtccagattgaacatacagtttgcactcatgattcacgttatataactatcaatattaacagttcgtttgatgatcatattatttttatgttttattgataattgtaaaaacatacaattaaatcaatatagaggaaggagacggatactgtcttttgtgagatagtcatggcgactaaatcagattatgaggatgctgttttttactttgtggatgatgataaaatatgtagtcgcgactccatcatcgatctaatagatgaatatatcacgtggagaaatcatgttatagtgtttaacaaagatattaccagttgtggaagactgtacaaggaattgatgaagttcgatgatgccgctatacagtactatggtattgataaaattaatgagattgtcgaagctatgagcgaaggagaccactacatcaattttacaaaagtccatgatcaggaaagtttattcgctaccataggaatatgtgctaaaatcactgaacattggggatacaaaaagatttcagaatctagattccaatcattgggaaacattacagatctgatgaccgacgataatataaacatcttgatactttttctagaaaaaaaattgaattgatgatataggggtcttcataacgcataattattacgttagcattctatatccgtgttaaaaaaaattatcctatcatgtatttgagagttttatatgtagcaaacatgatagctgtgatgccaataagctttagatattcacgcgtgctagtgttagggatggtattatctggtggtgaaatgtccgttatataatctacaaaacaatcatcgcatatagtatgcgatagtagagtaaacatttttatcgtttctactgggttcatacatcgtctacccaattcggttatgaatgaaattgtcgccaatcttacacccaaacccttgttatccattagcatagtattaacttcgttatttatgtcataaactgtaaatgattctgtagatgccatatcatacatgatattcatgtccctattataatcattactaactttatcacaatatatgttgataatatctatatatgatctagtctttgtgggcaactgtctatacaagtcgtctaaacgttgtttactcatatagtatcgaacagccatcattacatggtcccgttccgttgatagataatcgagtatgttagtggacttgtcaaatctatataccatattttctggaagtggatatacatagtcgtgatcaacattattgctagcctcatcttctatatcctgtactataccattatctatatcatctacataatctacgatattattatacataaacatcgacaacatactattgtcaattatctaagtcctgttgatccaaacccttgatctcctctatctgtactatctagagattgtacttcttccagttctggataatatatacgttgatagattagctgggctattctatcccccgtatttacattaaacgtacattttccattattaataagaataactcctatgtttcccctataatcttcgtctattacaccgcctcctatatcaatgccttttagggacagaccagacctaggagctattctaccatagcagaacttaggcatggacatactaatatctgtcttaattaactgtcgttctccaggagggatagtataatcgtaagcgctatataaatcatatccggcggcgtaaggtgattgcctagtaggagatttagctctgttagtttccttaacaaatctaactggtgagttaatattcatgttgaacataaaactaatattttatttcaaaattatttaccatcccatatattccatgaataagtgtgatgattgtacacttctatagtatctatatacgattcacgataaaatcctcctatcaatagcagtttattatccactatgatcaattctggattatccctcggataaataggatcatctatcagagtccatgtattgctggattcacaataaaattccgcatttctaccaaccaagaataaccttctaccgaacactaacgcgcatgatttataatgaggataataagtggatggtccaaactgccactgatcatgattgggtagcaaatattctgtagttgtatcagtttcagaatgtcctcccattacgtatataacattgtttatagatgccactgctggattacatctaggtttcagaagactcggcatattaacccaagcagcatccccgtggaaccaacgctcaacagatgtgggatttggtagacctcctactacgtataatttattgttagcgggtatcccgctagcatacagtctggggctattcatcggaggaattggaatccaattgtttgatatataatttacagctatagcattgttatgtatttcattgttcatccatccaccgatgagatatactacttctccaacatgagtacttgtacacatatggaatatatctataatttgatccatgttcataggatactctatgaatggatacttgtatgatttgcgtggttgtttatcacaatgaaatattttggtacagtctagtatccattttacattatttatacctctgggagaaagataatttgacctgattacatttttgataaggagtagcagatttcctaatttatttcttcgctttatataccacttaatgacaaaatcaactacataatcctcatctggaacatttagttcatcgctttctagaataagtttcatagatagataatcaaaattgtctatgatgtcatcttccagttccaaaaagtgtttggcaataaagtttttagtatgacataagagattggatagtccgtattctatacccatcatgtaacactcgacacaatattcctttctaaaatctcgtaagataaagtttatacaagtgtagatgataaattctacagaggttaatatagaagcacgtaataaattgacgacgttatgactatctatatatacctttccagtatatgagtaaataactatagaagttaaactgtgaatgtcaaggtctagacaaacccttgtaactggatctttatttttcgtgtatttttgacgtaaatgtgtgcgaaagtaaggagataactttttcaatatcgtagaattgactattatattgccacctatagcatcaataattgttttgaatttcttagtcatagacaatgctaatatattcttacagtacacagtattaacaaatatcggcatttatgtttctttaaaagtcaacatctagagaaaaatgattatctttttgagacataactcccattttttggtattcacccacacgtttttcgaaaaaattagtttttccttccaatgatatattttccatgaaatcaaacggattggtaacattataaatttttttaaatcccaattcagaaatcaatctatccgcgacgaattctatatatgttttcatcatttcacaattcattcctataagtttaactggaagagccgcagtaagaaattcttgttcaatggatactgcatctgttataatagatctaacggtttcttcactcggtggatacaataaatgtttaaacatcaaacatgcgaagtcgcagtgtagaccctcgtctctactaattagttcgttggaaaacgtgagtccgggcattaggccacgctttttaagccaaaatatggaagcgaatgatccggaaaagaagattccttctactgcagcaaaggcaataagtctctctccataaccggcgctgtcatgtatccacttttgagcccaatcggccttcttttttacacaaggcattgtttctatggcattaaagagatagtttttttcattactatctttaacataagtatcgatcaaaagactatacatttccgaatgaatgttttcaatggccatctgaaatccgtagaaacatctagcctcggtaatctgtacttctgtacaaaatcgttccgccaaattttcattcactattccgtcactggctgcaaaaaacgccaatacatgttttataaaatatttttcgtctggtgttagtttattccaatcattgatatctttagatatatctacttcttccactgtccaaaatgatgcctctgcctttttatacatgttccagatgtcatgatattggattgggaaaataacaaatctatttggatttggtgcaaggatgggttccataactaaattaacaatatcaataaattttttttcagttatctatatgcctgtacttggattttttgtacatcgatatcgccgcaatcactacaataattacaagtattattgatagcattgttattagtactatcataattaaattatcgacattcatgggtgctgaataatcgttattatcatcattatcattttgtaattgtgacatcatactaaataaatcgtttgcgagattgttgtgggaagcgggcatggaggatgcattatcattattatttaacgccttccatttggattcacaaatatggcgcgcgttcaacattttatggaaactataattttgtgaaaacagataacaagaaaactcgtcatcgttcaaatttttaacgatagtaaaccgattaaacgtcgagctaatttctaacgctagcgactctgttggatatgggtttccagatatatatcttttcagttcccctacgtatctataatcatctgtaggaaatggaagatatttccatttatctactgttcctaatatcatatgtggtggtgtagtagaaccattaagcgcgaaagatgttatttcgcatcgtattttaacttcgcaataatttctggttagataacgcactctaccagtcaagtcaatgatattagcctttacagatatattcatagtagtcgtaacgatgactccatcttttagatgcgatactcctttgtatgtaccagaatcttcgtacctcaaactcgatatatttaaacaagttaatgagatattaacgcgttttatgaatgatgatatataaccagaagttttatcctcggtggctagcgctataaccttatcattataataccaactagtgtgattaatatgtgacacgtcagtgtgggtacaaatatgtacattatcgtctacgtcgtattcgatacatccgcatacagccaacaaatataaaatgacaaatactctaacgccgttcgtacccatcttgatgcggtttaataaatgttttgatttcaatttattgtaaaaaaagattcggttttatactgttcgatattctcattgcttatattctcatctatcatctccacacagtcaaatccgtggttagcatgcacctcatcaaccggtaaaagactatcggactcttctatcattataactctagaatatttaatttggtcattattaatcaagtcaattatcttatttttaacaaacgtgagtattttactcattttttataaaaacttttagaaatatacagactctatcgtgtgtctatatcttctttttatatccaatgtatttatgtctgatttttcttcatttatcatatataatggtccaaattctacacgtgcttcggattcatccagatcattaaggttcttataattgtaacatccttctcttccctcttctacatcttccttcttattcttattcttagcgtcacagaatctaccacagcaggatcccatgacgagcgtcatattaaactaatccattttcaattataatatatgattagtaatgaccattaaaataaaaaatattcttcataaccggcaagaaagtgaaaagttcacattgaaactatgtcagtagtatacatcatgaaatgatgatatatatatactctattttggtggaggattatatgatataattcgtggataatcattcttaagacacatttcttcattcgtaaatcttttcacgttaaatgagtgtccatattttgcaatttcttcatatgatggcggtgtacgtggacgaggctgctcctgttcttgttgtggtcgccgactgtcgtgtttgcgtttatccctccattatcgcgattgcgtagatggagtactattatataccttgtaattaaatttttttattaattaaacgtataaaaacgttccgtatctgtatttaagagccagatttcgtctaatagaacaaatagctacagtaaaaataactagaataattgctacacccactagaaaccacggatcgtaatacggcaatcggttttcgataataggtggaacgtatattttatttaaggacttaacaattgtctgtaaaccacaatttgcttccgcggatcctgtattaactatctgtaaaagcatatgttggccgggcggagccgaacattctccgatatccaatttctgtatatctataatattattaacctccgcatacgcattacagttcttttctagcttggataccgcactaggtacatcgtctagatctattcctatttcctcagcgatagctcttctatccttttccggaagcaatgaaatcacttcaataaatgattcaaccatgagtgtgaaactaagtcgagaattactcatgcatttgttagttattcggagcgcgcaatttttaaactgtcctataacctctcctatatgaatagcacaagtgacattagtagggatagaatgttgagctaatttttgtaaataactatctataaaaagattatacaaagttttaaactctttagtttccgccatttatccagtctgagaaaatgtctctcataataaatttttccaagaaactaattgggtgaagaatggaaacctttaatctatatttatcacagtctgttttggtacacatgatgaattcttctaatgccgtactaaattcgatatctttttcgatttctggatatgtttttaataaagtatgaacaaagaaatggaaatcgtaataccagttatgtttaactttgaaattgttttttattttcttgttaatgattccagccacttgggaaaagtcaaagtcgtttaatgccgatttaatacgttcattaaaaacaaactttttatcctttagatgaattattattggttcattggaatcaaaaagtaagatattatcgggtttaagatctgcgtgtaaaaagttgtcgcagcatggtagttcgtagattttaatgtataacagagccatctgtaaaaagataaactttatgtattgtaccaaagatttaaatcctaatttgatagctaactcggtatctactttatctgccgaatacagtgctaggggaaaaattataatgtttcctctttcgtattcgtagttagttctcttttcatgttcgaaaaagtgaaacatgcggttaaaatagtttataacattaatattactgttaataactgccgggtaaaagtgggatagtaatttcacgaatttgatactgtcctttctctcgttaaacgcctttagaaaaactttagaagaatatctcaatgatagttcctgaccatccatagtttgtatcaataatagcaacatatgaagaacacgtttatacagagtatgtaaaaatgttaatttatagtttaatcccatggcccacgcacacacgattaattttttttcatctccctttagattgttgtatagaaatttgggtactgtgaactccgccgtagtttccatgggactatataattttgtggcctcgaatacaaattttactacatagttatctatcttaaaaactataccatatcctcctgtagatatgtgataaaaatcgtcgtttataggataaaatcgtttatccttttgttggaaaaaggatgaattaatgtaatcattctcttctatctttagtagtgtttccttattaaaattcttaaaataatttaacaatctaactgacggagcccaattttggtgtaaatctaattgggacattatattgttaaaatacaaacagtctcctaatataacagtatctgataatctatggggagacatccattgatattcaggggatgaatcattggcaacacccatttattgtacaaaaagccccaatttacaaacgaaagtccaggtttgatagagacaaactattaactattttgtctctgtttttaacacctccacagtttttaatttctttagtaatgaaattattcacaatatcagtatcttctttatctaccagagattttactaacttgataaccttggctgtctcattcaatagggtagtaatatttgtatgtgtgatattgatatctttttgaattgtttcttttagaagtgattctttgatggtgccagcatacgaattacaataatgcagaaactcggttaacatgcaggaattatagtaagccaattccaattgttgcctgtgttgtattagagtgtcaatatgagcaatggtgtccttgcgtttctctgatagaatgcgagcagcgattttggcgttatcatttgacgatatttctggaatgacgaatcctgtttctactaactttttggtaggacaaagtgaaacaatcaagaagatagcttctcctcctatttgtggaagaaattgaactcctctagatgatctactgacgatagtatctccttgacagatattggaccgaattacagaagtacctggaatgtaaagccctgaaaccccctcattttttaagcagattgttgccgtaaatcctgcactgtgaccaagatagagagctcctttggtgaatccatctctatgtttcagtttaaccaagaaacagtcagctggtctaaaatttccatctctatctaatacagcatctaacttgatgtcaggaactatgaccggtttaatgttatatgtaacattgagtaaatccttaagttcataatcatcactgtcatcagttatgtacgatccaaacaatgtttctactggcatagtggatacgaagatgctatccatcagaatgtttccctgattagtattttctatatagctattcttctttaaacgattttccaaatcagtaactatgttcatttttttaggagtaggacgcctagccagtatggaagaggattttctagatcctctcttcaacatctttgatctcaatggaatgcaaaaccccatagtgaaacaaccaacgataaaaataatattgtttttcactttttataattttaccatctgactcatggattcattaatatctttataagagctactaacgtataattctttataactgaactgagatatatacaccggatctatggtttccataattgagtaaatgaatgctcggcaataactaatggcaaatgtataaaacaacgaaattatactagagttgttaaagttaatattttctatgagctgttccaataaattatttgttgtgactgcgttcaagtcataaatcatcttgatactatccagtaaacagtctttaagttctggaatattatcatcccattgtaaagcccctaattcgactatcgaatatcctgctctgatagcagtttcaatatcgacggacgtcaatactgtaataaaggtggtagtattgtcatcatcgtgataaactacgggaatatggtcgttagtaggtacggtgactttacacaacgcgatatataactttccttttgtaccatttttaacgtagttgggacgtcctgcagggtattgttttgaagaaatgatatcgagaacagatttgatacgatatttgttggattcctgattattcactataatataatctagacagatagatgattcgataaatagagaaggtatatcgttggtaggataatacatccccattccagtattctcggatactctattgatgacactagttaagaacatgtcttctattctagaaaacgaaaacatcctacatggactcattaaaacttctaacgctcctgattgtgtctcgaatgcctcgtacaaggatttcaaggatgccatagattctttgaccaacgatttagaattgcgtttagcatctgatttttttattaaatcgaatggtcggctctctggtttgctaccccaatgataacaatagtcttgtaaagataaaccgcaagaaaatttatacgcatccatccaaataaccctagcaccatcggatgatattaatgtattattatagattttccatccacaattattgggccagtatactgttagcaacggtatatcgaatagattactcatgtaacctactagaatgatagttcgtgtactagtcataatatctttaatccaatctaagaaatttaaaattagattttttacactgttaaagttaacaaaggtattacccggatacgtggatatcatatatggcattggtccattatcagtaatagctccataaactgatacggcgatggtttttatatgtgtttgatctaacgaggaagaaattcgcgcccacaattcatctctagatatgtatttaatatcaaacggtaacacatcaatttcgggacgcgtatatgtttctaaatttttaatccaaatataatgatgacctatatgccctattatcatactgtcaactatagtacacctagagaacttacgatacatctgtttcctataatcgttaaattttacaaatctataacatgctaaaccttttgacgacaaccattcattaatttctgatatggaatctgtattctcgataccgtattgttctaaagccagtgctatatctccctgttcgtgggaacgctttcgtataatatcgatcaacggataatctgaagtttttggagaataatatgactcatgatctatttcgtccataaacaatctagacataggaattggaggcgatgatcttaattttgtgcaatgagtcgtcaatcctataacttctaatattgtaatattcatcatcgacataacactatctatgttatcatcgtatattagtataccacggccttcttcatttcgtgccaaaataatatacagtcttaaataattacgcaatatctcaatagtttcataattgttagctgttttcatcaaggtttgtatcctgtttaacatgatggcgttctataacgtctctattttctatttttaattttttaaatttttaacgatttactgtggctagatacccaatctctctcaaatatttttttagcctcgcttacaagctgtttatctatactattaaaactgacgaatccgtgattttggtaatgggttccgtcgaaatttgccgaagtgatatgaacatattcgtcgtcgactatcaacaattttgtattattctgaatagtgaaaaccttcacagatagatcattttgaacacacaacgcgtctagacttctggcggttgccatagaatatacgtcgttcttatcccaattaccaactagaagtctgatcttaactcctctattaatggctgcttctataatggagttgtaaatgtcaggccaatagtagctattaccgtcgacacgtgtagtgggaactatggccaaatgttcaatatctatactagtcttagccgacttgagtttatcaataactacatcagtgtctagatctctagaatatcccaataggtgttctggagaatcagtaaagaacactccacctataggattcttaatatgatacgcagtgctaactggcagacaacaagccgcagagcataaattcaaccatgaattttttgcgctattaaaggctttaaaagtatcaaatcttctacgaagatctgtggccagcgggggataatcagaatatacacctaacgttttaatcgtatgtatagatcctccagtaaatgacgcgtttcctacataacatctttcatcatctgacacccaaaaacaaccgagtagtagtcccacattattttttttatctatattaacggttataaaatttatatccgggcagtgactttgtagctctcccagatttcttttccctcgttcatctagcaaaactattattttaatccctttttcagatgcctcttttagtttatcaaaaataagcgcgcccctagtcgtactcagaggattacaacaaaaagatgctatgtatatatatttcttagctagagtgataatttcgttaaaacattcaaatgttgttaaatgatcggatctaaaatccatattttctggtagtgtttctaccagcctacattttgctcccgcaggtaccggtgcaaatggccacatttagttaacataaaaacttatacatcctgttctatcaacgattctagaatatcatcggctatatcgctaaaattttcatcaaagtcgacatcacaacctaactcagtcaatatattaagaagttccatgatgtcatcttcgtttatttctatatccgtatccattgtagattgttgaccgattatcgagtttaaatcattactaatactcaatccttcagaatacaatctgtgtttcattgtaaatttataggcggtgtatttaagttggtagattttcaattatgtatcaatatagcaacagtagttcttgctcctccttgattctagcatcctcttcattattttcttctacgtacataagcatgtccaatacgttagacaacacaccgacgatggcggccgccacagacacgaatatgactagaccgatgaccatttaaaaacccctctctagctttcacttaaactgtatcgattattcttttagaacatgtataatataaaaacattattctatttcgaatttaggcttccaaaaatttttcatccgtaaaccgataataatatatatagacttgttaatagtcggaataaatagattaatgcttaaactatcatcatctccacgattagagatacaatatttacattctttttgctgtttcgaaactttatcaatacacgttaatacaaacccaggaaggagatattgaaactgaggctgttgaaaatgaaacggtgaatacaataattcagataatgtaaaatcatgattccgtattctgatgatattagaactgctaatggatgtcgatggtatgtatctaggagtatctattttaacaaagcatcgatttgctaatatacaattatcattttgattaattgttattttattcatattcttaaaaggtttcatatttatcaattcttctacattaaaaatttccatttttaatttatgtagccccgcaatactcctcattacgtttcattttttgtctataatatccattttgttcatctcggtacatagattatccaattgagaagcgcatttagtagttttgtacattttaagtttattgacgaatcgtcgaaaactagttatagttaacattttattatttgataccctgatattaatacccctgccgttactattatttataactgatgtaacccacgtaacattagaattaattatcgatagtaatgcatcgacgcttccaaaattgtctattataaactcaccgataatttttttattgcatgttttcatattcattaggattatcaaatctttaatcttattacgattgtatgcgttgatattacaagacgtcattctaaaagacggaggatctccatcaaatgccagacaatcacgtacaaagtacatggaaataggttttgttctattgcgcatcatagattcatatagaacacccatagaaatactaatttgttttactctataaaatactaatgcatctatttcatcgttttgtataacgtctttccaagtgccaaattccaaatttttttcattgatagtaccaaattcttctatctctttaactacttgcatagataggtaattacagtgatgcctacatgccgttttttgaaactgaatagatgcgtctagaagcgatgctacactagtcacaatcaccactttcatatttagaatatatgtatgtaaaaatatagtagaatttcattttgtttttttctatgctataaatgaattctcattttgcatctgctcatactccgttttatatcaataccaaagaaggaagatatctggttctaaaagccgttaaagtatgcgatgttagaactgtagaatgcgaaggaagtaaagcttcctgcgtactcaaagtagataaaccctcatcgcccgcgtgtgagagaagaccttcgtccccgtccagatgcgagagaatgaataaccctggaaaacaagtcccgtttatgaggacggacatgctacaaaatatgttcgcggctaatcgcgataatgtagcttctagacttttgtcctaaaatactattatatccttttcgatattaataaatccgtgtcgtccaggttttttatctctttcagtatgtgaatagataggtattttatctctattcatcatcgaatttaagagatccgataaacattgtttgtattctccagatgtcagcatctgatacaacaatatatgtgcacataaacctctggcacttatttcatgtaccttccccttatcactaaggagaatagtatttgagaaatatgtatacatgatattatcatgaattagatatacagaatttgtaacactctcgaaatcacacgatgtgtcggcgttaagatctaatatatcactcgataacacattttcatctagatacactagacattttttaaagctaaaatagtctttagtagtgacagtaactatgcgattattttcatcgatgatacatttcatcggcatattattacgcttaccatcaaagactataccatgtgtatatctaacgtattctagcatggttgccatacgtgcattaaacttttcaggatctttggatagatcttccaatctatctatttgagaaaacatttttatcatgttcaatagttgaaacgtcggatccactatatagatattatctataaagattttaggaactacgttcatggtatcctggcgaatattaaaactatcaatgatatgattatcgttttcatcttttatcaccatatagtttctaagatatgggattttacttaatataatattatttcccgtgataaattttattagaaaggccaaatctataagaaaagtcctagaattagtctgaagaatatctatatcgccgtaccgtatatttggattaattagatatagagaatatgatccgtaacatatacaacttttattatggcgtctaagatattcttccatcaacttattaacatttttgactagggaagatacattatgacgtcccattacttttgccttgtctattactgcgacgttcatagaatttagcatatctcttgccaattcttccattgatgttacattataagaaattttagatgaaattacatttggagctttaatagtaagaactcctaatatgtccgtgtatgtggtcactaatacagattgtagttctataatcgtaaataatttacctatattatatgtttgagtctgtttagaaaagtagctaagtatacgatcttttatttctgatgcagatgtatcaacatcggaaaaaaatctttttttattcttttttactaaagatacaaatatgtctttgttaaaaacagttattttctgaatatttctagcttgtaattttaacatatgatattcgttcacactaggtactctgcctaaataggtttctataatctttaatgtaatattaggaagagtattctgatcaggattcctattcattttgaggatttaaaactctgattattgtctaatatggtctcaacacaaactttttcacagagcgatagagtttttgataactcgtttttcttaagaaatataaaactactgtttccagagctcgctctatcttttattttatctaattcgatacaaactcctgatactggttcagaaagtaattcattaattttcagtcctttatagaagatatttaatatagataatacaaaattttcagttcttgatatcgatctgattgatcctagaactagatatattaataacgtgctcattaggcagtttatggcagcttgataattagatatagtatattccagttcatatttattagataccgcattgcccagattttgatattctatgaattcctctgaaaataaatccaaaataactagacattctattttttgtggattagtgtactctcttccctctatcatgttcactactggtgtccacgatgataaatatctagagggaatataatatagtccataggatgccaatctagcaatgtcgaataactgtaatttgattcttcgttcttcattatgaattgattcttgaggtataaacctaacacaaattatattattagacttttcgtatgtaatgtctttcatgttataagtttttaatcctggaatagaatctattttaatgaggcttttaaacgcagagttctccaacgagtcaaagcataatactctgttgtttttcttatatacgatgttacgattttcttctttgaatggaataggtttttgaattagtttataattacaacataatagataaggaagtgtgcaaatagtacgcggaaaaaacataatagctcccctgttttcatccatggttttaagtaaatgatcactggcttctttagtcaatggatattcgaacattaaccgtttcatcatcattggacagaatccatatttcttaatgtaaagagtgatcaaatcattgtgtttattgtaccatcttgttgtaaatgtgtattcggttatcggatctgctcctttttctattaaagtatcgatgtcgatctcgtctaagaattcaactatatcgacatatttcatttgtatacacataaccattactaacgtagaatgtataggaagagatgtaacgggaacagggtttgttgattcgcaaactattctaatacataattcttctgttaatacgtcttgcacgtaatctattatagatgccaagatatctatataattattttgtaagatgatgttaactatgtgatctatataagtagtgtaataattcatgtatttcgatatatgttccaactctgtctttgtgatgtctagtttcgtaatatctatagcatcctcaaaaaatatattcgcatatattcccaagtcttcagttctatcttctaaaaaatcttcaacgtatggaatataataatctattttacctcttctgatatcattaatgatatagtttttgacactatcttctgtcaattgattcttattcactatatctaagaaacggatagcgtccctaggacgaactactgccattaatatctctattatagcttctggacataattcatctattataccagaattaatgggaactattccgtatctatctaacatagttttaagaaagtcagaatctaagacctgatgttcatatattggttcatacatgaaatgatctctattgatgatagtgactatttcattctctgaaaattggtaactcattctatatatgctttccttgttgatgaaggatagaatatactcaatagaatttgtaccaacaaactgttctcttatgaatcgtatatcatcatctgaaataatcatgtaaggcatacatttaacaattagagacttgtctcctgttatcaatatactattcttgtgataatttatgtgtgaggcaaatttgtccacgttctttaattttgttatagtagatatcaaatccaatggagctacagttcttggcttaaacagatatagtttttctggaacgaattctacaacattattataaaggactttgggtagataagtgggatgaaatcctattttaattaatgcgatagccttgtcctcgtgcagatatccaaacgcttttgtgatagtatggcattcattgtctagaaacgctctacgaatatctgtgacagatatcatctttagagaatatactagtcgcgttaatagtactacaatttgtattttttaatctatctcaataaaaaaattaatatgtatgattcaatgtataactaaactactaactgttattgataactagaatcagaatctaatgatgacgtaaccaagaagtttatctactgccaatttagctgcattatttttagcatctcgtttagattttccatctgccttatcgaatactcttccgtcgatgtctacacaggcataaaatgtaggagagttactaggccccactgattcaatacgaaaagaccaatctctcctagtaatttggcagtactcattaataacggtgacagggttagcacctttccaatcaataatttttttagccggaataacatcatcaaaagacttatgatcctctctcattgatttttcgcgggatacatcatctattatggcgtcagccataacatcagcatccggcttatccgcctccgttgtcataaaccaacgaggaggaatatcgtcggagctgtacaccatagcactacgttgaagatcgtacagagctttattaacttctcgcttctccatattaagttgtctagttagttgtgcagcagtagctccttcgattccaatggttttaatagcctcacacacaatctctgcgttagaacgttcgtcgatatagattttagacatttttagagagaactaacacaaccagcaataaaactgaacctactttatcatttttttattcatcatcctctggtggttcgtcgttcctatcgaatgtggatctgattaacccgtcatctataggtgatgctggttctggagattctggaggagatggattattatctggaagaatctctgttatttccttgttttcatgtatcgattgcgttgtaacattaagattgcgaaatgctctaaatttgggaggcttaaagtgttgtttgcaatctctacacgcatgtctaactagtggaggttcgtcagcggctctagtttgaatcatcatcggcgtagtattcctacttttacagttaggacacggtgtattgtatttctcgtcgagaacgttaaaataatcgttgtaactcacatcctttattttatctatattgtattctactcctttcttaatgcattttataccgaataagagatagcgaaggaattctttttcggtgccgctagtacccttaatcatatcacatagtgttttatattccaaatttgtggcaatagacggtttatttctatacgatagtttgtttctggaatcctttgagtattctataccaatattattctttgattcgaatttagtttcttcgatattagattttgtattacctatattcttgatgtagtactttgatgatttttccatggcccattctattaagtcttccaagttggcatcatccacatattgtgatagtaattctcggatatcagtagcggctaccgccattgatgtttgttcattggatgagtaactactaatgtatacattttccatttataacacttatgtattaactttgttcatttatattttttcattattatgttgatattaacaaaagtgaatatatatgttaataattgtattgtggttatacggctacaatttcataatgagtggaagtcagtgtccgatgatcaatgacgatagctttactctgaaaagaaagtatcaaatcgatagtgcggagtcaacaataaaaatggataagaagaggataaagtttcagaatagagccaaaatggtaaaagaaataaatcagacaataagagcagcacaaactcattacgagacattgaaactaggatacataaaatttaagagaatgattaggactactactctagaagatatagcaccatctattccaaataatcagaaaacttataaactattctcggacatttcagccatcggcaaagcatcacagaatccgagtaagatggtatatgctctgctgctttacatgtttcccaatttgtttggagatgaccatagattcattcgttatagaatgcatccaatgagtaaaatcaaacacaagatcttctctcctttcaaacttaatcttattagaatattagtggaagaaagattctataataatgaatgcagatctaataaatggagaataattggaacacaagttgataaaatgttgatagctgaatctgataaatatacaatagatgcaaggtataacctaaaacccatgtatagaatcaagggaaaatctgaagaagataccctcttcatcaaacagatggtagaacaatgtgtgacatcccaggaattggtggaaaaagtgttgaagatactgtttagagatttgttcaagagtggagaatacaaagcatacagatacgatgatgatgtagaaaatggatttattggattggatacactaaaattaaacattgttcatgatatagttgaaccatgtatgcctgttcgtaggccagtggctaagatactgtgtaaagaaatggtaaataaatactttgagaatccgctacatattattggtaaaaatcttcaagagtgcattgactttgttagtgaataggcatttcatctttctccaatactaattcaaattgttaaattaataatggatagtataaatagttattagtgataaaatagtaaaaataattattagaataagagtgtagtatcatagataactctcttctataaaaatggattttattcgtagaaagtatcttatatacacagtagaaaataatatagattttttaaaggatgatacattaagtaaagtaaacaattttaccctcaatcatgtactagctctcaagtatctagttagcaattttcctcaacacgttattactaaggatgtattagctaataccaatttttttgttttcatacatatggtacgatgttgtaaagtgtacgaagcggttttacgacacgcatttgatgcacccacgttgtacgttaaagcattgactaagaattatttatcgtttagtaacgcaatacaatcgtacaaggaaaccgtgcataaactaacacaagatgaaaaatttttagaggttgccgaatacatggacgaattaggagaacttataggcgtaaattatgacttagttcttaatccattatttcacggaggggaacccatcaaagatatggaaatcatttttttaaaactgtttaagaaaacagacttcaaagttgttaaaaaattaagtgttataagattacttatttgggcatacctaagcaagaaagatacaggcatagagtttgcggataatgatagacaagatatatatactctatttcaacaaactggtagaatcgtccatagcaatctaacagaaacgtttagagattatatctttcccggagataagactagctattgggtgtggttaaacgaaagtatagctaatgatgcggatatcgttcttaatagacacgccattaccatgtatgataaaattcttagttatatatactctgagataaaacaaggacgcgttaataaaaacatgcttaagttagtttatatctttgagcctgaaaaagatatcagagaacttctgctagaaatcatatatgatattcctggagatatcctatctattattgatgcaaaaaacgacgattggaaaaaatattttattagtttttataaagctaattttattaacggtaatacatttattagtgatagaacgtttaacgaggacttattcagagttgttgttcaaatagatcccgaatatttcgataatgaacgaattatgtctttattctctacgagtgctgcggacattaaacgatttgatgagttagatattaataacagttatatatctaatataatttatgaggtgaacgatatcacattagatacaatggatgatatgaagaagtgtcaaatctttaacgaggatacgtcgtattatgttaaggaatacaatacatacctgtttttgcacgagtcggatcccatggtcatagagaacggaatactaaagaaactgtcatctataaaatccaagagtagacggctgaacttgtttagcaaaaacattttaaaatattatttagacggacaattggctcgtctaggtcttgtgttagatgattataaaggagacttgttagttaaaatgataaaccatcttaagtctgtggaggatgtatccgcattcgttcgattttctacagataaaaaccctagtattcttccatcgctaatcaaaactattttagctagttataatatttccatcatcgtcttatttcaaaggtttttgagagataatctatatcatgtagaagaattcttggataaaagcatccatctaaccaagacggataagaaatatatacttcaattgataagacacggtagatcatagaacagaccaaatatattattaataatttgtatatacatagatataattatcacatattaaaaattcacacatttttgataaatgggaactgctgcaacaattcagactcccaccaaattaatgaataaagaaaatgcagaaatgattttggaaaaaattgttgatcatatagttatgtatattagtgacgaatcaagtgattcagaaaataatcctgaatatattgattttcgtaacagatacgaagactatagatctctcattataaaaagtgatcacgagtttgtaaagctatgtaaaaatcatgcagagaaaagttctccagaaacgcaacaaatgattatcaaacacatatacgaacaatatcttattccagtatctgaagtactattaaaacctataatgtccatgggtgacataattacatataacggatgtaaagacaatgaatggatgctagaacaactctctaccctaaactttaacaatctccgcacatggaactcatgtagcataggcaatgtaacgcgtctgttttatacattttttagttatctgatgaaagataaactaaatatataagtataatcccattctaatactttaacctgatgtattacctgcatcttattagaatattaacctaactaaaagacataacataaaaactcattacatagttgataaaaagcggtaggatataaatattatggctgccaccgttccgcgttttgacgacgtgtacaaaaatgcacaaagaagaattctagatcaagaaacattttttagtagaggtctaagtagaccgttaatgaaaaacacatatctatttgataattacgcgtatggatggataccagaaactgcaatttggagtagtagatacgcaaacttagatgcaagtgactattatcccatttcgttgggattacttaaaaagttcgagtttctcatgtctctatataaaggtcctattccagtatacgaagaaaaagtaaatactgaattcatagccaatggatcgttctctggtagatacgtatcatatcttcgaaagttttctgctcttccaacaaacgagtttattagttttttgttactgacttccattccaatctataatatcttgttctggtttaaaaatactcagtttgatattactaaacacacattattcagatacgtctatacagataatgccaaacacctggcgttggctaggtatatgcatcaaacaggagactataagcctttgtttagtcgtctcaaagagaattatatatttaccggtcccgttccaataggtatcaaagatatagatcaccctaatcttagtagagcaagaagtccatccgattatgagacattagctaatattagtactatattgtactttaccaagtatgatccggtattaatgtttttattgttttacgtacctgggtattcaattactacaaaaattactccagccgtagaatatctaatggataaactgaatctaacaaagagcgacgtacaactgttgtaaattattttatgcttcgtaaaatgtaggttttgaaccaaacattctttcaaagaatgagatgcataaaactttattatccaatagattgactatttcggacgtcaatcgtttaaagtaaacttcgtaaaatattctttgatcactgccgagtttaaaacttctatcgataattgtctcatatgttttaatatttacaagttttttggtccatggtacattagccggacaaatatatgcaaaataatatcgttctccaagttctatagtttctggattatttttattatattcagtaaccaaatacatattagggttatctgcggatttataatttgagtgatgcattcgactcaacataaataattctagaggagacgatctactatcaaattcggatcgtaaatctgtttctaaagaacggagaatatctatacatacctgattagaattcatccgtccttcagacaacatctcagacagtctggttttgtacatcttaatcatattcttatgaaacttggaaacatctcttctagtttcactagtacctttattaattctctcaggtacagattttgaattcgacgatgccgagtatttcatcgttgtatatttcttcttcgattgcataatcagattcttatataccgcctcaaactctattttaaaattattaaacaatactctactattaatcagtcgttctaactctttcgctatttctatagacttatctacatcttgactgtctatctctgtaaacacggagtcggtatctccatacacgctacgaaaacgaaatctgtaatctataggcaacgatgttttcacaatcggattaatatctctatcgtccatataaaatggattacttaatggattggcaaaccgtaacataccgttagataactctgctccatttagtaccgattctagatacaagatcattctacgtcctatggatgtgcaactcttagccgaagcgtatgagtatagagcactatttctaaatcccatcagaccatatactgagttggctactatcttgtacgtatattgcatggaatcataaatggccttttcagttgaactggtagcctgttttaacatctttttatatctggctctctctgccaaaaatgttcttaatagtctaggaatggttccttctatcgatctatcgaaaattgctatttcagagatgaggttcggtagtctaggttcacaatgaaccgtaatatatctaggaggtggatatttctgaagcaatagctgattatttatttcttcttccaatctattggtactaacaacgacaccgactaatgtttccggagatagatttccaaagatacacacattaggatacagactgttataatcaaagattaatacattattactaaacattttttgttttggagcaaataccttaccgccttcataaggaaacttttgttttgtttctgatctaactaagatagttttagtttccaacaatagctttaacagtggacccttgatgactgtactcgctctatattcgaataccatggattgaggaagcacatatgttgacgcacccgcgtctgtttttgtttctactccataatactcccacaaatactgacacaaacaagcatcatgaatacagtatctagccatatctaaagctatgtttagattataatccttatacatctgagctaaatcaacgtcatcctttccgaaagataatttatatgtatcattaggtaaagtaggacataatagtacgactttaaatccattttcccaaatatctttacgaattactttacatataatatcctcatcaacagtcacataattacctgtggttaaaacctttgcaaatgcagcggctttgcctttcgcgtccgtagtatcgtcaccgatgaacgtcatttctctaactcctctatttaatactttacccatgcaactgaacgcgttcttggatatagaatccaatttgtacgaatccaatttttcagatttttgaatgaatgaatatagatcgaaaaatatagttccattattgttattaacgtgaaacgtagtattggccatgccgcctactcccttatgactagactgatttctctcataaatacagagatgtacagcttcctttttgtccggagatctaaagataatcttctctcctgttaataactctagacgattagtaatatatctcagatcaaagttatgtccgttaaaggtaacgacgtagtcgaacgttagttccaacaattgtttagctattcgtaacaaaactatttcagaacatagaactagttctcgttcgtaatccatttccattagtgactgtatcctcaaacatcctctatcgacggcttcttgtatttcctgttccgttaacatctcttcattaatgagcgtaaacaataatcgtttaccacttaaatcgatataacagtaacttgtatgcgagattgggttaataaatacagaaggaaacttcttatcgaagtgacactctatatctagaaataagtacgatcttgggatatcgaatctaggtatttttttagcgaaacagttacgtggatcgtcacaatgataacatccattgttaatctttgtcaaatattgctcgtccaacgagtaacatccgtctggagatatcccgttagaaatataaaaccaactaatattgagaaattcatccatggtggcattttgtatgctgcgtttctttggctcttctatcaaccacatatctgcgacggagcattttctatctttaatatctagattataacttattgtctcgtcaatgtctatagttctcatctttcccaacggcctcgcattaaatggaggaggagacaatgactgatatatttcgtccgtcactacgtaataaaagtaatgaggaaatcgtataaatacggtctcaccatttcgacatctggatttcagatataaaaatctgttttcaccgtgactttcaaaccaattaatgcaccgaacatccatttatagaatttagaaatatattttcatttaaatgaatcccaaacattggggaagagccgtatggaccattatttttatagtactttcgcaagcgggtttagacggcaacatagaagcgtgtaaacgaaaactatatactatagtcagcactcttccatgtcctgcatgtagacggcacgcgactatcgctatagaggacaataatgtcatgtctagcgatgatctgaattatatttattattttttcatcagattatttaacaatttggcatctgatcccaaatacgcgatcgatgtgacaaaggttaaccctttataaacttaacccattataaaacttatgattagtcacaactgaaataaccgcgtgattattttttggtataattctacacggcatggtttctgtaactatgaattcaacccccgttacattagtgaaatctttaacaaacagcaagggttcgtcaaagacataaaactcattgtttacaatcgaaatagaccccctatcacacttaaaataaaaaatatccttatcctttaccaccaaataaaattctgattggtcaatgtgaatgtattcacttaacagttccacaaatttatttattaactccgaggcacatacatcgtcggtattttttatggcaaactttactcttccagcatccgtttctaaaaaaatattaacgagttccatttatatcatccaatattattgaaatgacgttgatggacagatgatacaaataagaaggtacggtacctttgtccaccatctcctccaattcatgctctattttgtcattaactttaatgtatgaaaacagtacgccacatgcttccatgacagtgtgtaacactttggatacaaaatgtttgacattagtataattgttcaagactgtcaatctataatagatagtagctataatatattctatgatggtattgaagaagatgacaaccttggcatattgatcatttaacacagacatggtatcaacagatagcttgaatgaaagagaatcagtaattggaataagcgtcttctcgatagagtgtccgtataccaacatgtctgatattttgatgtattccattaaattatttagttttttctttttattttcgttaaacagcatttctgtcaacggaccccaacatcgttgaccgattaagttttgattgatttttccgtgtaatgcgtatctagtcagatcgtatagcctatccaataatccatcatctgtgcgtagatcacatcgtacactttttaattctctatagaagagcgacagacatctggagcaattacagacagcaatttctttattctctacagatgtaagatacttgaagacattcctatgatgatgcagaattttggataacacggtattgatggtatctgttaccataattcctttgatggctgatagtgtcagagcacaagatttccaatctttgacaatttttagcaccattatctttgttttgatatctatatcagacagcatggtgcgtctgacaacacagggattaagacggaaagatgaaatgattctctcaacatcttcaatggataccttgctattttttctggcattatctatatgtgcgagaatatcctctagagaatcagtatcctttttgatgatagtggatctcaatgacatgggacgtctaaaccttcttattttatcaccagattgcatggtgatttgtcttctttcttttatcataatgtaatctctaaattcatcggcaaattgtctatatctaaaatcataatatgagatgtttacctctacaaatatctgttcgtccaatgttagagtatctacatcagttttgtattccaaattaaacatggcaacggatttaattttatattcctctattaagtcctcgtcgataataacagaatgtagataatcatttaatccatcgtacatggttggaagatgcttgttgacaaaatctttaattgtcttgatgaaggtgggactatatctaacatcttgattaataaaatttataacattgtccataggatactttgtaactagttttatacacatctcttcatcggtaagtttagacagaatatcgtgaacaggtggtatattatattcatcagatatacgaagaacaatgtccaaatctatattgtttaatatattatatagatgtagcgtagctcctacaggaatatctttaactaagtcaatgatttcatcaaccgttagatctattttaaagttaatcatataggcattgatttttaaaaggtatgtagccttgactacattctcattaattaaccattccaagtcactgtgtgtaagaagattatattctatcataagcttgactacatttggtcccgataccattaaagaattcttatgatataaggaaacagcttttaggtactcatctactctacaagaattttggagagccttaacgatatcagtgacgtttattatttcaggaggaaaaaacctaacattgagaatgtcggagttaatagcttccagatacagtgattttggcaatagtccgtgtaatccataatccagtaacacgagctggtgcttgctagacaccttttcaatgtttaatttttttgaaataagctttgataaagccttcctcgcaaattccggatacatgaacatgtcggcgacatgattaagtattgttttttcattatttttatattttctcaacaagttctcaataccccaatagatgatagaatatcacccaatgcgtccatgttgtctatttccaacaggtcgctatatccaccaatagaagtttttccaaaaaagattctaggaacagttctaccaccagtaatttgttcaaaatagtcacgcaattcattttcgggtttaaattctttaatatcgacaatttcatacgctcctcttttgaaactaaacttatttagaatatccagtgcatttctacaaaaaggacatgtatacttgacaaaaattgtcactttgttattggccaacctttgttgtacaaattcctcggccattttaatatttaagtgatataaaactatctcgacttatttaactctttagtcgagatatatggacgcagatagctatatgatagccaactacagaaggcaaacgctataaaaaacataattacgacgagcatatttataaatatttttattcagcattacttgatatagtaatattaggcacagtcaaacattcaaccactctcgatacattaactctctcattttctttaacaaattctgcaatatcttcgtaaaaagattcttgaaactttttagaatatctatcgactctagatgaaatagcgttcgtcaacatactatgttttgtatacataaaggcgcccattttaacagtttctagtgacaaaatgctagcgatcctaggatcctttagaatcacatagattgacgattcgtctctcttagtaactctagtaaaataatcatacaatctagtacgcgaaataatattatccttgacttgaggagatctaaacaatctagttttgagaacatcgataagttcatcgggaatgacatacatactatctttaatagaactcttttcatccagttgaatggattcgtccttaaccaactgattaatgagatcttctattttatcattttccagatgatatgtatgtccattaaagttaaattgtgtagcgcttctttttagtctagcagccaatactttaacatcactaatatcgatatacaaaggagatgatttatctatggtattaagaattcgtttttcgacatctgtcaaaaccaattcctttttgcctgtatcatccagttttccatcctttgtaaagaaattattttctactagactattaataagactgataaggattcctccataattgcacaatccaaactttttaacaaaactagactttacaagatctacaggaatgcgtacttcaggtttcttagcttgtgattttttcttttgtggacattttcttgtgaccaactcatctaccatttcattgattttagcagtgaaataagctttcaatgcacgggcactgatactattgaaaacgagttgatcttcaaattccgccatttaagttcaccaaacaacttttaaatacaaatatatcaatagtagtagaataagaactataaaaaaaataataattaaccaataccaaccccaacaaccggtattattagttgatgtgactgttttctcatcacttagaacagatttaacaatttctataaagtctgtcaaatcatcttccggagaccccataaatacaccaaatatagcggcgtacaacttatccatttatacattgaatattggcttttctttatcgctatcttcatcatattcatcatcaatatcaacaagtcccagattacgagccagatcttcttctacattttcagtcattgatacacgttcactatctccagagagtccgataacgttagccaccacttctctatcaatgattagtttcttgagtgcgaatgtaatttttgtttccgttccggatctatagaaaactacaggtgtgataattgccttggccaattgtctttctcttttactgagtgattctagttcaccttctatagatctgagaatggatgattctccagtcgaaacatattctaccatggatccgtttaatttgttgatgaagatggattcatccttaaatgttttctctgtaatagtttccaccgaaagactatgcaaagaatttggaatgcgttccttgtgcttaatgtttccatagacggcttctagaagttgatacaacataggactagccgcggtaacttttatttttagaaagtatccatcgcttctatcttgtttagatttatttttataaagtttagtctctccttccaacataataaaagtggaagtcatttgactagataaactatcagtaagttttatagagatagacgaacaattagcgtattgagaagcatttagtgtaacgtattcgatacattttgcattagatttactaatcgattttgcatactctataacacccgcacaagtctgtagagaatcgctagatgcagtaggtcttggtgaagtttcaactctcttcttgattaccttactcatgattaaacctaaataattgtactttgtaatataatgatatatattttcactttatctcatttgagaataaaaatgtttttgtttaaccactgcatgatgtacagatttcggaatcgcaaaccaccagtggttttattttatccttgtccaatgtgaattgaatgggagcggatgcgggtttcgtacgtagatagtacattcccgtttttagaccgagactccatccgtaaaaatgcatactcgttagtttggaataactcggatctgctatatggatattcatagattgactttgatcgatgaaggctcccctgtctgcagccatttttatgatcgtcttttgtggaatttcccaaatagttttataaactcgcttaatatcttctggaaggtttgtattctgaatggatccaccatctgccataatcctattcttgatctcatcattccataattttctctcggttaaaactctaaggagatgcggattaactacttgaaattctccagacaatactctccgagtgtaaatattactggtatacggttccaccgactcattatttcccaaaatttgagcagttgatgcagtcggcataggtgccaccaataaactatttctaagaccgtatgttctgattttatcttttagaggttcccaattccaaagatccgacggtacaacattccaaagatcatattgtagaataccgttactggcgtacgatcctacatatgtatcgtatggtccttccttctcagctagttcacaactcgcctctaatgcaccgtaataaatggtttcgaagatcttcttatttagatcttgtgcttccaggctatcaaatggataatttaagagaataaacgcgtccgctaatccttgaacaccaataccgataggtctatgtctcttattagagatttcagcttctggaataggataataattaatatctataattttattgagatttctgacaattactttgaccacatccttcagtttgagaaaatcaaatcgcccatctattacaaacatgttcaaggcaacagatgccagattacaaacggctacctcattagcatccgcatattgtattatctcagtgcaaagattactacacttgatagttcctaaattttgttgattactctttttgttacacgcatccttataaagaatgaatggagtaccagtttcaatctgagattctataatcgctttccagacgactcgagcctttattatagatttgtatctcctttctctttcgtatagtgtatacaatcgttcgaactcgtctccccaaacattgtccaatccaggacattcatccggacacatcaacgaccactctccgtcatccttcactcgtttcataaagagatcaggaatccaaagagctataaatagatctctggttctatgttcctcgtttcctgtattctttttaagatcgaggaacgccataatatcagaatgccacggttccaagtatatggccataactccaggccgtttgtttcctccctgatctatgtatctagcggtgttattataaactctcaacattggaataataccgtttgatataccattggtaccggagatatagcttccactggcacgaatattactaattgatagacctattccccctgccattttagagattaatgcgcatcgttttaacgtgtcatagataccctctatgctatcatcgatcatgttaagtagaaaacagctagacatttggtgacgactagttcccgcattaaataaggtaggagaagcgtgcgtaaaccatttttcagaaagtagattgtacgtctcaatagctgagtctatatcccattgatgaattcctactgcgacacgcattaacatgtgctgaggtctttcaacgatcttgttgtttattttcaacaagtaggatttttccaaagttttaaaaccaaaatagttgtatgaaaagtctcgttcgtaaataataaccgagttgagtttatccttatatttgttaactatatccatggtgatacttgaaataatcggagaatgtttcccatttttaggattaacatagttgaataaatcctccatcacttcactaaatagtttttttgtttccttgtgtagatttgatacggctattctggcggctagaatggcataatccggatgttgtgtagtacaagtggctgctatttcggctgccagagtgtccaattctaccgttgttactccattatatattccttgaataaccttcatagctattttaataggatctatatgatccgtgtttaagccataacataattttctaatacgagacgtgattttatcaaacatgacattttccttgtatccatttcgtttaatgacaaacatttttgttggtgtaataaaaaaattatttaacttttcattaatagggatttgacgtatgtagcgtacaaaattatcgttcctggtatatagataaagagtcctatatatttgaaaatcgttacggctcgattaaactttaatgattgcatagtgaatatatcattaggatttaactccttgactatcagggcggcaccagaaattaccatcaaaagcattaatacagttatgccgatcgcagttagaacggttatagcatccaccatttatatctaaaaattagatcaaagaatatgtgacaaagtcctagttgtatactgagaattgacgaaacaatgtttcttacatatttttttcttattagtaactgacttaatagtaggaactggaaagctagacttgattattctataagtatagatacccttccaaataatattctctttgataaaagttccagaaaatgtagaattttttaaaaagttatcttttgctattaccaagattgtgtttagacgcttattattaatatgagtgatgaaatccacaccgcctctagatatcgcttttatttccacattagatggtaaatccaatagtgaaactatctttttaggaatgtatggactcgcgtttagaggagtgaacgtcttaggcgtcggaaaggatgattcatcaaacgaataaacaatttcacaaatggatgttaatgtattagtaggaaattttttgacgctagtggaattgaagattctaatggatgatgttctacctatttcatccgataacatgttaatttccgacaccaacggttttaatatttcgatgatatacggtagtctctctttcggacttatatagcttattccacaatacgagtcattatatactccaaaaaacaaaataactagtataaaatctgtatcgaatgggaaaaacgaaattatcgacataggtatagaatctggaacattgaacgtattaatacttaattctttttctgtggtaagtaccgataggttattgacattgtatggttttaaatattctataacttgagacttgatagatattagtgatgaattgaaaattatttttatcaccacgtgtgtttcaggatcatcgtcgacgcccgtcaaccaaccgaatggagtaaaataaatatcattaatatatgctctagatattagtatttttatcaatcctttgattatcatcttctcgtaggcgaatgattccatgatcaagagtgatttaagaacatcctccggagtattaatgggcttagtaaacagtccatcgttgcaataataaaagttatccaagttaaaggatattatgcattcgtttaaagatatcacctcatctgacggagacaattttttggtaggttttagagactttgaagctacttgtttaacaaagttattcatcgtcgtttactattctatttaattttgtagttaatttatcacatatcacattaattgactttttggtccatttttccatacgtttatattcttttaatcctgcgttatccgtttccgttatatccagggatagatcttgcaagttaaatagaatgctcttaaataatgtcatttttttatccgctaaaaatttaaagaatgtataaacttttttcaaagatttaaaacttttaggtggagttctagtacacaatatcataaacaaactaataaacatcccgcattcagattccaacagctgattaacttccacattaatacagcctattttcgctccaaatgtacattcgaaaaatctgaataaaacatcgatgtcacaatttgtattatccaatacagaatgtctgtgattcgtgttaaaaccatcggagaaggaatagaaataaaaattattatagtggtggaattcagttggaatattgcctccggagtcataaaaggatactaaacattgttttttatcataaattacacatttccaatgagacaaataacaaaatccaaacattacaaatctagaggtagaacttttaattttgtctttaagtatatacgataagatatgtttattcataaacgcgtcaaatttttcatgaatcgctaaggagtttaagaatctcatgtcaaattgtcctatataatccacttcggatccataagcaaactgagagactaagttcttaatacttcgattgctcatccaggctcctctctcaggctctattttcatcttgacgacctttggattttcaccagtatgtattcctttacgtgataaatcatcgattttcaaatccatttgtgagaagtctatcgccttagatactttttcccgtagtcgaggtttaaagaaatacgctaacggtatactagtaggtaactcaaagacatcatatatagaatggtaacgcgtctttaactcgtcggttaactctttcttttgatcgagttcgtcgctactattgggtctgctcaggtgccccgactctactagttccaacatcataccgataggaatacaagacactttgccagcggttgtagatttatcatatttctccactacatatccgttacaatttgttaaaaatttagatacatctatattgctacataatccagctagtgaatatatatgacataataaattggtaaatcctagttctggtattttactaattactaaatctgtatatctttccatttatcatggaaaagaatttaccagatatcttcttttttccaaactgcgttaatgtattctcttacaaatattcacaagatgaattcagtaatatgagtaaaacggaacgtgatagtttctcattggcggtgtttccagttataaaacatagatggcataacgcacacgttgtaaaacataaaggaatatacaaagttagtacagaagcacgtggaaaaaaagtatctcctccatcactaggaaaacccgcacacataaacctaaccgcgaagcaatatatatacagtgaacacacaataagctttgaatgttatagttttctaaaatgtataacaaatacagaaatcaattcgttcgatgagtatatattaagaggactattagaagctggtaatagtttacagatattttccaattccgtaggtaaacgaacagatactataggtgtactagggaataagtatccatttagcaaaattccattggcctcattaactcctaaagcacaacgagagatattttcagcgtggatttctcatagacctgtagttttaactggaggaactggagtgggtaagacgtcacaggtacccaagttattgctttggtttaattatttatttggtggattctctactctagataaaatcactgactttcacgaaagaccagtcattctatctcttcctaggatagctttagttagattgcatagcaataccattttaaaatcattgggatttaaggtactagatggatctcctatttctttacggtacggatctataccggaagaattaataaacaaacaaccaaaaaaatatggaattgtattttctacccataagttatctctaacaaaactatttagttatggcactcttattatagacgaagttcatgagcatgatcaaataggagatattattatagcagtagcgagaaagcatcatacgaaaatagattctatgtttttaatgactgccacgttagaggatgacagggaacggctaaaagtatttttacctaatcccgcatttatacatattcctggagatacactgtttaaaattagcgaggtatttattcataataagataaatccatcttccagaatggcatacatagaagaagaaaagagaaatttagttactgctatacagatgtatactcctcctgatggatcatccggtatagtctttgtggcatccgttgcacagtgtcacgaatataaatcatatttagaaaaaagattaccgtatgatatgtatattattcatggtaaggtcttagatatagacgaaatattagaaaaagtgtattcatcacctaatgtatcgataattatttctactccttatttggaatccagcgttactatacacaatgttacacacatttatgatatgggtagagtttttgtccccgctccttttggaggatcgcaacaatttatttctaaatctatgagagatcaacgaaaaggaagagtaggaagagttaatcctggtacatacgtctatttctatgatctgtcttatatgaagtctatacagcgaatagattcagaatttctacataattatatattgtacgctaataagtttaatctaacactccccgaagatttgtttataatccctacaaatttggatattctatggcgtacaaaggaatatatagactcgttcgatattagtacagaaacatggaataaattattatccaattattatatgaagatgatagagtatgctaaactttatgtactaagtcctattctcgctgaggagttggataactttgagaggacgggagaattaactagtattgtacgagaagccattttatctctaaatttacgaattaagattttaaattttaaacataaagatgatgatacgtatatacacttttgtaaaatattattcggtgtctataacggaacaaacgctactatatattatcatagacctctaacgggatatatgaatatgatttcagatactatatttgttcctgtagataataactaaaaatcaaactctaatgaccacatctttttttagagatgaaaaattttctacatctccttttgtagacacgactaaacattttgcagaaaaaagtttattagtgtttagataatcgtatacttcatcagtgtagatagtaaatgtgaacagataaaaggtattcttgctcaatagattggtaaattccatagaatatattaatcctttcttcttgagatcccacatcatttcaaccagagacgttttatccaatgatttacctcgtactataccacatacaaaactagattttgcagtgacgtcgtacctggtattcctaccaaacaaaattttacttttagttcttttagaaaattctaaggtagaatctctatttgccaatatgtcatctatggaattaccactagcaaaaaatgatagaaatatatattgatacatcgcagctggttttgatctactatactttaaaaacgaatcagattccataattgcctgtatatcatcagctgaaaaactatgttttacacgtattccttcggcatttctttttaatgatatatcttgtttagacaatgataaagttatcatgtccatgagagacgcgtctccgtatcgtataaatatttcattagatgttagacgcttcattaggggtatacttctataaggtttcttaatcagtccatcattggttgcgtcaagaactactatcggatgttgttgggtatctctagtgttacacatggccttactaaagtttgggtaaataactatgatatctctattaattatagatgcatatatttcattcgtcaaggatattagtatcgacttgctatcgtcattaatacgtgtaatgtaatcatataaatcatgcgatagccaaggaaaatttaaatagatgttcatcatataatcgtcgctataattcatattaatacgttgacattgactaatttgtaatatagcctcgccacgaagaaagctctcgtattcagtttcatcgataaaggataccgttaaatataactggttgccgatagtctcatagtctattaagtggtaagtttcgtacaaatacagaatccctaaaatattatctaatgttggattaatctttaccataactgtataaaatggagacggagtcataactattttaccgtttgtacttactggaatagatgaaggaataatctccggacatgctggtaaagacccaaatgtctgtttgaagaaatccaatgttccaggtcctaatctcttaacaaaaattacgatattcgatcccgatatcctttgcattctatttaccagcatatcacgaactatattaagattatctatcatgtctattctcccaccgttatataaatcgcctccgctaagaaacgttagtatatccatacaatggaatacttcatttctaaaatagtattcgttttctaattctttaatgtgaaatcgtatactagaaagggaaaaattatctttgagttttccgttagaaaagaaccacgaaactaatgttctgattgcgtccgattccgttgctgaattaatggatttacaccaaaaactcatataacttctagatgtagaagcattcgctaaaaaattagtagaatcaaaggatataagtagatgttccaacaagtgagcaattcccaagatttcatctatatcattctcgaatccgaaattagaaattcccaagtagatatcctttttcatccgatcgttgatgaaaatacgaactttattcggtaagacaatcatttactaaggagtaaaataggaagtaatgttcgtatgtcgttatcatcgtataaattaaaggtgtgttttttaccattaagtgacattataattttaccaatattggaattataatataggtgtatttgcgcactcgcgacggttgatgcatcggtaaatatagctgtatctaatgttctagtcggtatttcatcatttcgctgtctaataatagcgttttctctatctgtttccattacagctgcctgaagtttattggtcggataatatgtaaaataataagaaatacatacgaataacaaaaataaaataagatataataaagatgccatttagagatctaattttgttcaacttgtccaaattcctacttacagaagatgaggaatcgttggagatagtgtcttccttatgtagaggatttgaaatatcttatgatgacttgataacttactttccagataggaaataccataaatatatttataaagtatttgaacatgtagatttatcggaggaattaagtatggaattccatgatacaactttgcgagatttagtttatcttagattgtacaagtattccaagtgtatacggccgtgttataaattaggagataatctaaaaggcatagttgttataaaggacaggaatatttatattagggaagcaaatgatgacttgatagaatatctcctcaaggaatacactcctcagatttatacatattctaatgagcgcgtccccataactggttcaaaattaattctttgtggattttctcaagttacatttatggcgtatacaacgtcgcatataacaacaaataaaaaggtagatgttctcgtttccaaaaaatgtatagatgaactagtcgatccaataaattatcaaatacttcaaaatttatttgataaaggaagcggaacaataaacaaaatactcaggaagatattttattcggtaaccggtggccaaactccataggtagctttttctatttcggattttagaatttccaaattcaccagcgatttatcggttttggtgaaatccaaggatttattaatgtccacaaatgccatttgttttgtctgtggattgtatttgaaaatggaaacgatgtagttagatagatgcgctgcgaagtttcctattagggttccgcgcttcacgtcacccagcatacttgaatcaccatcctttaaaaaaaatgataagatatcaacatggagtatatcatactcggattttaattcttctactgcatcactgacattttcacaaatactacaatacggtttaccgaaaataatcagtacgttcttcatttatgggtatcaaaaacttaaaatcgttactgctggaaaataaatcactgacgatattagatgataatttatacaaagtatacaatggaatatttgtggatacaatgagtatttatatagccgtcgccaattgtgtcagaaacttagaagagttaactacggtattcataaaatacgtaaacggatgggtaaaaaagggagggcatgtaaccctttttatcgatagaggaagtataaaaattaaacaagacgttagagacaagagacgtaaatattctaaattaaccaaggacagaaaaatgctagaattagaaaagtgtacatccgaaatacaaaatgttaccggatttatggaagaagaaataaaggcaaaaatgcaattaaaaatcgataaacttacatttcaaatatatttatctgattctgataacataaaaatatcattgaatgagatactaacacatttcaacaataatgagaatgttacattattttattgtgatgaacgagacgcagaattcgttatgtgtctcgaggctaaaacacatttctctaccacaggagaatggccgttgataataagtaccgatcaggatactatgctatttgcatctactgataatcatcctaagatgataaaaaacttaactcaactgtttaaatttgttccctcggcagaggataactatttagcaaaattaacggcgttagtgaatggatgtgatttctttcctggactctatggggcatctataacacccaccaacttaaacaaaatacaattgtttagtgattttacaatcgataatatagtcactagtttggcaattaaaaattattatagaaagactaactctaccgtagacgtgcgtaatattgttacgtttataaacgattacgctaatttagacgatgtctactcgtatgttcctccttgtcaatgcactgttcaagaatttatattttccgcattagatgaaaaatggaatgaatttaaatcatcttatttagagaccgttccgttaccctgtcaattaatgtacgcgttagaaccacgtaaggagattgatgtttcagaagttaaaactttatcatcttatatagatttcgaaaatactaaatcagatatcgatgttataaaatctatatcctcgatttttggatattctaacgaaaactgtaacacgatagtattcggcatctataaggataatttactactgagtataaataattcattttactttaacgatagtctgttaataaccaatactaaaagtgataatataataaatataggttactagattaaaaatggtgttccaactcgtgtgctctacatgcggtaaagatatttctcacgaacgatataaattgattatacgaaaaaaatcattaaaggatgtactcgtcagtgtaaagaacgaatgttgtaggttaaaattatctacacaaatagaacctcaacgtaacttaacagtgcaacctctattggatataaactaatatggatccggttaattttatcaagacatatgcgcctagaggttctattatttttattaattataccatgtcattaacaagtcatttgaatccatcgatagaaaaacatgtgggtatttattatggtacgttattatcggaacacttggtagttgaatctacctatagaaaaggagttcgaatagtcccattggatagtttttttgaaggatatcttagtgcaaaagtatacatgttagagaatattcaagttatgaaaatagcagctgatacgtcattaactttattgggtattccgtatggatttggtcatgatagaatgtattgttttaaattggtagctgactgttataaaaatgccggtgttgaaacatcgtctaaacgaatattaggtaaagatatttttctgagccaaaacttcacagacgataatagatggataaagatatatgattctaataatttaacattttggcaaattgattaccttaaagggtgagttaatatgcataactactcctccgttgttttttccctcgttctttttcttaacgttgtttgccatcactctcataatgtaaagatattctaaaatggtaaacttttgcatatcggacgcagaaattggtataaatgttgtaattgtattatttcccgtcaatggactagtcacagctccatcagttttatatcctttagagtatttctcactcgtgtctaacattctagagcattccatgatctgtttatcgttgatattggccggaaagatagattttttattttttattatattactattggcaattgtagatataacttctggtaaatatttttctaccttttcaatctcttctattttcaagccggctatatattctgctatattgttgctagtatcaataccttttcttgctaagaagtcatatgtggtattcactatatcagttttaactggtagttccattagcctttccacttctgcagaataatcagaaattggttctttaccagaaaatccagctactataataggctcaccgatgatcattggcaaaatcctatattgtaccagattaatgagagcatatttcatttccaataattctgctagttcttgagacattgatttatttgatgaatctagttggttctctagatactctaccatttctgccgcatacaataacttgttagataaaatcagggttatcaaagtgtttagcgtggctagaatagtgggcttgcatgtattaaagaatgcggtagtatgagtaaaccgttttaacgaattatatagtctccagaaatctgtggcgttacatacatgagccgaatgacatcgaagattgtccaatatttttaatagctgctctttgtccattatttctatatttgactcgcaacaattgtagataccattaatcactgattcctttttcgatgccggacaatagcacaattgtttagctttggactctatgtattcagaattaatagatatatctcttaatacagattgcactatacattttgaaactatgtcaaaaattgtagaacgacgctgttctgcagccatttaactttaaataatttacaaaaatttaaaatgagcatccgtataaaaatcgataaactgcgccaaattgtggcatatttttcagagttcagtgaagaagtgtctataaatgtagactcgacggatgagttaatgtatatttttgccgccttgggcggatctgtaaacatttgggccattatacctctcagtgcatcagtgttctaccgcggagccgaaaatattgtgtttaatcttccggtgtccaaggtaaaatcgtgtttgtgtagttttcacaatgatgccatcatagatatagaacctgatctggaaaataatctagtaaaactttctagttatcatgtagtaagtgtcgattgtaacaaggaactgatgcctattaggacagatactactatttgtctaagtatagatcaaaagaaatcttacgtgtttaattttcacaagtatgaagaaaaatgttgtggtagaaccgtcattcatttagaatggttgttgggctttatcaagtgtattagtcagcatcagcatttggctattatgtttaaagatgacaatattattatgaagactcctggtaatactgatgcgttttccagggaatattctatgactgaatgttctcaagaactacaaaagttttctttcaaaatagctatctcgtctctcaacaaactacgaggattcaaaaagagagtcaatgtttttgaaactagaatcgtaatggataatgacgataacattctaggaatgttgttttcggatagagttcaatcctttaagatcaacatctttatggcgtttttagattaatactttcaatgagataaatatgggtggcggagtaagtgttgagctccctaaacgggatccgcctccgggagtacccactgatgagatgttattaaacgtggataaaatgcatgacgtgatagctcccgctaagcttttagaatatgtgcatataggaccactagcaaaagataaagaggataaagtaaagaaaagatatccagagtttagattagtcaacacaggacccggtggtctttcggcattgttaagacaatcgtataatggaaccgcacccaattgctgtcgcacttttaatcgtactcattattggaagaaggatggaaagatatcagataagtatgaagagggtgcagtattagaatcgtgttggccagacgttcacgacactggaaaatgcgatgttgatttattcgactggtgtcagggggatacgttcgatagaaacatatgccatcagtggatcggttcagcctttaataggagtgatagaactgtagagggtcaacaatcgttaataaatctgtataataagatgcaaacattatgtagtaaagatgctagtgtaccaatatgtgaatcatttttgcatcatttacgcgcacacaatacagaagatagcaaagagatgatcgattatattctaagacaacagtctgcggactttaaacagaaatatatgagatgtagttatcccactagagataagttagaagagtcattaaaatatgcggaacctcgagaatgttgggatccagagtgttcgaatgccaatgttaatttcttactaacacgtaattataataatttaggactttgcaatattgtacgatgtaatactagcgtgaacaacttacagatggataaaacttcctcattaagattgtcatgtggattaagcaatagtgatagattttctactgttcccgtcaatagagcaaaagtagttcaacataatattaaacattcgttcgacctaaaattgcatttgatcagtttattatctctcttggtaatatggatactaattgtagctatttaaatgggtgccgcggcaagcatacagacgacggtgaatacactcagcgaacgtatctcgtctaaattagaacaagaagcgaacgctagtgctcaaacaaaatgtgatatagaaatcggaaatttttatatccgacaaaaccatggatgtaacctcactgttaaaaatatgtgctctgcggacgcggatgctcagttggatgctgtgttatcagccgctacagaaacatatagtggattaacaccggaacaaaaagcatacgtgccagctatgtttactgctgcgttaaacattcagacaagtgtaaacactgttgttagagattttgaaaattatgtgaaacagacttgtaattctagcgcggtcgtcgataacaaattaaagatacaaaacgtaatcatagatgaatgttacggagccccaggatctccaacaaatttggaatttattaatacaggatctagcaaaggaaattgtgccattaaagcgttgatgcaattgacgactaaggccactactcaaatagcacctagacaagttgctggtacaggagttcagttttatatgattgttatcggtgttataatattggcagcgttgtttatgtactatgccaagcgtatgctgttcacatccaccaatgataaaatcaaacttattttagccaataaggaaaacgtccattggactacttacatggacacattctttagaacttctccgatggttattgctaccacggatatacaaaactgaaaatatattgataatattttaatagattaacatggaagttatcgctgatcgtctagacgatatagtgaaacaaaatatagcggatgaaaaatttgtagattttgttatacacggtctagagcatcaatgtcctgctatacttcgaccattaattaggttgtttattgatatactattatttgttatagtaatttatatttttacggtacgtctagtaagtagaaattatcaaatgttgttggtggcgctagtcatcacattaactattttttattactttatactataatagtactagactgacttctaacaaacatctcacctgccataaataaatgcttgatattaaagtcttctatttctaacactattccatctgtggaaaataatactctgacattatcgctaattgacacatcggtgagtgatatgcctataaagtaataatcttctttgggcacatataccagtgtaccaggttctaacaacctatttactggtgctcctgtagcatactttttctttaccttgagaatatccatcgtttgcttggtcaatagcgatatgtgattttttatcaaccactcgaaaaagtaattggagtgttcatatcctctacgggctattgtctcatggccgtgtatgaaatttaagtaacacgactgtggtagatttgttctatagagccggttgccgcaaatagatagaactaccaatatgtctgtacaaatgttaaacattaattgattaacagaaaaaacaatgttcgttctgggaatagaaaccagatcaaaacaaaattcgttagaatatatgccacgtttatacattgaatataaaataactacagtttgaaaaataacagtatcatttaaacatttaacttgcggggttaatctcacaactttactgtttttaaactgttcaaaatatagcatcgatccatgagaaatacgtttagccgcctttaatagaggaaatcccaccgcctttctggatctcaccaacgacgatagttctgaccagcaactcatttcttcatcatccacctgttttaacatataataggcaggagatagatatccgtcattgcaatattccttctcgtaggcacacaatctaatattgataaaatctccattctcttctctgcatttattatcttgtttcggtggctgattaggctgtagtcttggtttaggctttggtatatcgttgttgaatctattttggtcattaaatctttcatttcttcctggtatatttttatcacctcgtttggttggatttttgtctatattatcgtttgtaacatcggtacgggtattcatttatcacaaaaaaaacttctctaaatgagtctactgctagaaaacctcatcgaagaagataccatattttttgcaggaagtatatctgagtatgatgatttacaaatggttattgccggcgcaaaatccaaatttccaagatctatgctttctatttttaatatagtacctagaacgatgtcaaaatatgagttggagttgattcataacgaaaatatcacaggagcaatgtttaccacaatgtataatataagaaacaatttgggtctaggagatgataaactaactattgaagccattgaaaactatttcttggatcctaacaatgaagttatgcctcttattattaataatacggatatgactgccgtcattcctaaaaaaagtggtaggagaaagaataagaacatggttattttccgtcaaggatcatcacctatcttgtgtattttcgaaactcgtaaaaagattaatatttataaagaaaatatggaatccgcatcgactgagtatacacctatcggagacaacaaggctttgatatctaaatatgcgggaattaatatcctaaatgtgtattctccttccacatccataagattgaatgccatttacggattcaccaataaaaataaactagagaaacttagtactaataaggaactagaatcgtatagttctagccctcttcaagaacccattaggttaaatgattttctgggactattggaatgtgttaaaaagaatattcctctaacagatattccgacaaaggattgattactataaatggagaatgttcctaatgtatactttaatcctgtgtttatagagcccacgtttaaacattctttattaagtgtttataaacacagattaatagttttatttgaagtattcgttgtattcattctaatatatgtattttttagatctgaattaaatatgttcttcatgcctaaacgaaaaatacccgatcctattgatagattacgacgtgctaatctagcgtgtgaagacgataaattaatgatctatggattaccatggatgacaactcaaacatctgcgttatcaataaatagtaaaccgatagtgtataaagattgtgcaaagcttttgcgatcaataaatggatcacaaccagtatctcttaacgatgttcttcgcagatgatgattcattttttaagtatttggctagtcaagatgatgaatcttcattatctgatatattgcaaatcactcaatatctagactttctgttattattattgatccaatcaaaaaataaattagaagccgtgggtcattgttatgaatctctttcagaggaatacagacaattgacaaaattcacagactttcaagattttaaaaaactgtttaacaaggtccctattgttacagatggaagggtcaaacttaataaaggatatttgttcgactttgtgattagtttgatgcgattcaaaaaagaatcctctctagctaccaccgcaatagatcctattagatacatagatcctcgtcgcgatatcgcattttctaacgtgatggatatattaaagtcgaataaagtgaacaataattaattctttattgtcatcatgaacggcggacatattcagttgataatcggccccatgttttcaggtaaaagtacagaattaattagacgagttggtaccaaaaattgaaaaactagcgtctttttttgctcgactgcagaccatggagacacccaagcctaggatactgccctggctcgtgagccagctcgatctcggccaactcgaaggtgtcgcttggttggacgagtcaaggacaagattcagaataccctggaagcatggcctgagacaggatgctcagatggccgattttggtatttttcaagcttgggccgaagcttctggtgcttacacccccggcaaggataaacctgatgtgtccacttggaaacggaatttccggtctgccttgaaccggaaggaagtgttgcgcctcgccgcagataactctaaagatccttacgaccctcacaaagtttatgagtttgttactcccggggcaagagattttgtgcatcttggggcttcacccgatactaatggaaaaagtagtcttccccacagtcaggagaatcttcccaaactttttgatgggcttattctcgggcccttgaaggatgaggggagttccgatttggcaatagtctctgacccaagccagcaactgccatcaccaaacgtcaacaattttctcaatccagccccccaagagaacccccttaaacagcttcttgccgaggagcaatgggagttcgaagttactgccttctatcgcgggaggcaggtattccaacaaaccttgttttgtccaggaggcttgagactcgtgggcagcactgctgatatgactctgccctggcagccagtgaccctccccgaccctgaagggttcctgactgacaaactcgtgaaggagtacgtgggacaagtactgaagggcctgggaaatggtcttgccctctggcaagctggacagtgcttgtgggctcaacgccttggacattcacacgcattttgggccctcggggaggagcttcttcctgacagtggccgcggaccagatggcgaggtacataaggataaagatggtgcagtcttcgacctcagaccatttgtcgcagaccttatcgccttcatggaaggttccggtcacagccctagatatacactttggttctgtatgggggaaatgtggccacaagatcaaccttgggtcaagcgccttgttatggtaaaggtggtccctacatgtttgaaagagctgctcgaaatggctcgggaaggaggagcctcttctttgaaaactgtagacctgcacatatctaacagccaaccaatcagcctgacctccgatcagtacaaagcttaccttcaagaccttgtcgaggacatggacttccaagccacaggcaacatttgattaattaatttttatgagctcggaggtaatgatatgtatcaatcggtgtgtagaaagtgttacatcgactcataatattatattttttatctaaaaaactaaaaataaacattgattaaattttaatataatacttaaaaatggatgttgtgtcgttagataaaccgtttatgtattttgaggaaattgataatgagttagattacgaaccagaaagtgcaaatgaggtcgcaaaaaaactaccgtatcaaggacagttaaaactattactaggagaattattttttcttagtaagttacagcgacacggtatattagatggtgccaccgtagtgtatataggatcggctcctggtacacatatacgttatttgagagatcatttctataatttaggagtgatcatcaaatggatgctaattgacggccgccatcatgatcctattttaaatggattgcgtgatgtgactctagtgactcggttcgttgatgaggaatatctacgatccatcaaaaaacaactgcatccttctaagattattttaatttctgatgtaagatccaaacgaggaggaaatgaacctagtacggcggatttactaagtaattacgctctacaaaatgtcatgattagtattttaaaccccgtggcatctagtcttaaatggagatgcccgtttccagatcaatggatcaaggacttttatatcccacacggtaataaaatgttacaaccttttgctccttcatattcagctgaaatgagattattaagtatttataccggtgagaacatgagactgactcgagttaccaaattagacgctgtaaattatgaaaaaaagatgtactaccttaataagatcgtccgtaacaaagtagttgttaactttgattatcctaatcaggaatatgactattttcacatgtactttatgctgaggaccgtgtactgcaataaaacatttcctactactaaagcaaaggtactatttctacaacaatctatatttcgtttcttaaatattccaacaacatcaactgaaaaagttagtcatgaaccaatacaacgtaaaatatctagcaaaaattctatgtctaaaaacagaaatagcaagagatccgtacgcggtaataaatagaaacgtgctactgagatatactaccgatatagagtataatgatttagttactttaataaccgttagacataaaattgattctatgaaaactgtgtttcaggtatttaacgaatcatccataaattatactccggttgatgatgattatggagaaccaatcattataacatcgtatcttcaaaaaggtcataacaagtttcctgtaaattttctatacatagatgtggtaatatctgacttatttcctagctttgttagactagatactacagaaactaatatagttaatagtgtactacaaacaggcgatggtaaaaagactcttcgtcttcccaaaatgttagagacggaaatagttgtcaagattctctatcgccctaatataccattaaaaattgttagatttttccgcaataacatggtaactggagtagagatagccgatagatctgttatttcagtcgctgattaatcaattagtagagatgagataagaacattataataatcaataatattatcttatatctcgtttagaaaaatgctaatattaaaatagctaacgctagtaatccaatcggaagccatttgatatctataatagggtatctaatttcctgattcagatagcggacagctatattctcggtagctactcgtttggaatcacaaacattatttacatctaatttactatctgtaatggaaacgtttcccaatgaaatggtacaatccgatacattgcattttgttatatttttttttaaagaggctggtaacaacgcatcgcttcgtttacatggctcgtaccaacaataatagggtaatcttgtatctattcctatccgtactatgcttttatcaggataaatacatttacatcgtatatcgtctttgttagcatcacagaatgcataaatttgttcgtccgtcatgataaaaatttaaagtgtaaatataactattatttttatagttgtaataaaaagggaaatttgattgtatactttcggttctttaaaagaaactgacttgataaaaatggctgtaatctctaaggttacgtatagtctatatgatcaaaaagagattaatgctacagatattatcattagtcatgttaaaaatgacgacgatatcggtaccgttaaagatggtagactaggtgctatggatggggcattatgtaaaacttgtgggaaaacggaattggaatgtttcggtcactggggtaaagtaagtatttataaaactcatatagttaagcctgaatttatttcagaaattattcgtttactgaatcatatatgtattcactgcggattattgcgttcacgagaaccgtattccgacgatattaacctaaaagagttatcgggacacgctcttaggagattaaaggataaaatattatccaagaaaaagtcatgttggaacagcgaatgtatgcaaccgtatcaaaaaattactttttcaaagaaaaaggtttgtttcgtcaacaagttggatgatattaacgttcctaattctctcatctatcaaaagttaatttctattcatgaaaagttttggccattattagaaattcatcaatatccagctaacttattttatacagactactttcccatccctccgctgattattagaccggctattagtttttggatagatagtatacccaaagagaccaatgaattaacttacttattaggtatgatcgttaagaattgtaacttgaatgctgatgaacaggttatccagaaggcggtaatagaatacgatgatattaaaattatttctaataacactaccagtatcaatttatcatatattacatccggcaaaaataatatgattagaagttatatcgtcgcccgacgaaaagatcagaccgctagatctgtaattggtcccagtacatctatcaccgttaatgaggtaggaatgcccgcatatattagaaatacacttacagaaaagatatttgttaatgcctttacagtggataaagttaaacaactattagcgtcaaaccaagttaaattttactttaataaacgattaaaccaattaacaagaatacgccaaggaaagtttatcaaaaataaaatacatttattgcctggtgattgggtagaagtagctgttcaagaatatacaagtattatttttggaagacagccgtctctacatagatacaacgtcatcgcttcatctatcagagctaccgaaggagatactatcaaaatatctcccggaattgccaactctcaaaatgctgatttcgacggagatgaagaatggatgatattggagcaaaatcctaaagccgtaattgaacaaagtattcttatgtatccgacgacgttactcaaacacgatattcatggagcccccgtttatggatctattcaagatgaaatcgtagcagcgtattcattgtttaggatacaagatctttgtttagatgaagtattgaacatcttggggaaatatggaagagagttcgatcctaaaggtaaatgtaaattcagcggtaaagatatctatacttacttgataggtgaaaagattaattatccgggtctcttaaaggatggtgaaattattgcaaacgacgtagatagtaattttgttgtggctatgaggcatctgtcattggctggactcttatccgatcataagtcgaacgtggaaggtatcaactttattatcaagtcatcttatgtttttaagagatatctatctatttacggttttggggtgacattcaaagatctgagaccaaattcgacgttcactaataaattggaggccatcaacgtagaaaaaatagaacttatcaaagaagcatacgccaaatatctcaacgatgtaagagacgggaaaatagttccattatctaaagctttagaggcggactatgtggaatccatgttatccaacttgacaaatcttaatatccgagagatagaagaacatatgagacaaacgctgatagatgatccagataataacctcctgaaaatggccaaagcgggttataaagtaaatcctacagaactaatgtatattctaggtacgtatggacaacaaaggattgatggtgaaccagcagagactcgagtattgggtagagtcttaccttactatcttccagactctaaggatccagaaggaagaggttacattcttaattctttaacaaaaggattaacgggttctcaatattacttttcgatgctggttgccagatctcaatctactgatatcgtctgtgaaacatcacgtaccggaacactggctagaaaaatcattaaaaagatggaggatatggtggtcgacggatacggacaagtagttataggtaatacgctcatcaagtacgccgccaattataccaaaattctaggctcagtatgtaaacctgtagatcttatctatccagatgagtccatgacttggtatttggaaattagtgctctgtggaataaaataaaacagggattcgtttactctcagaaacagaaacttgcaaagaagacattggcgccgtttaatttcctagtattcgtcaaacccaccactgaggataatgctattaaggttaaggatctgtacgatatgattcataacgtcattgatgatgtgagagagaaatacttctttacggtatctaatatagattttatggagtatatattcttgacgcatcttaatccttctagaattagaattacaaaagaaacggctatcactatctttgaaaagttctatgaaaaactcaattatactctaggtggtggaactcctattggaattatttctgcacaggtattgtctgagaagtttacacaacaagccctgtccagttttcacactactgaaaaaagtggtgccgtcaaacaaaaacttggtttcaacgagtttaataacttgactaatttgagtaagaataagaccgaaattatcactctggtatccgatgatatctctaaacttcaatctgttaagattaatttcgaatttgtatgtttgggagaattaaatccagacatcactcttcgaaaagaaacagataaatatgtagtagatataatagttaatagattatacatcaagagagcagaaataaccgaattagttgtcgaatatatgattgaacgatttatctcctttagcgtcattgtaaaggaatggggtatggagacattcattgaggacgaggataatattagatttactgtctacctaaatttcgttgaaccggaagaattgaatcttagtaagtttatgatggttcttccgggtgccgccaacaagggcaagattagtaaattcaagattcctatctctgattatacgggttatgacgacttcaatcaaacaaaaaagctcaataagatgactgtagaactcatgaatctaaaagaattgggttctttcgatttggaaaacgtcaacgtgtatcctggagtatggaatacatacgatatcttcggtatcgaggccgctcgtgaatacttgtgcgaagccatgttaaacacctatggagaagggttcgattatctgtatcagccttgtgatcttctcgctagtttactatgtgctagttacgaaccagaatcagttaataaattcaagttcggtgcagctagtactcttaagagagctacgttcggagacaataaagcattgttaaacgcggctcttcataaaaagtcagaacctattaacgataatagtagctgccacttttttagcaaggtccctaatataggaactggatattacaaatactttatcgacttgggtcttctcatgagaatggaaaggaaactatctgataagatatcttctcaaaagatcaaggaaatggaagaaacagaagacttttaattcttatcaataacatatttttctatgatctgtcttttaaacgatggattttccacaaatgcgcctctcaagtccctcatagaatgatacacgtataaaaaatatagcataggcaatgactccttatttttagacattagatatgccaaaatcatagccccgcttctatttactcccgcagcacaatgaaccaacacgggctcgtttcgttgatcacatttagataaaaaggcggttacgtcgtcaaaatatttactaatatcggtagttgtatcatctaccaacggtatatgaataatattaatattagagttaggtaatgtatatttatccatcgtcaaatttaaaacatatttgaacttaacttcagatgatggtgcatccatagcatttttataatttcccaaatacacattattggttacccttgtcattatagtgggagatttggctttgtgcatatctccagttgaacgtagtagtaagtatttatacaaacttttcttatccatttataacgtacaaatggataaaactactttatcggtaaacgcgtgtaatttagaatacgttagagaaaaggctatagtaggcgtacaagcagccaaaacatcaacacttatattctttgttattatattggcaattagtgcgctattactctggtttcagacgtctgataatccagtctttaatgaattaacgagatatatgcgaattaaaaatacggttaacgattggaaatcattaacggatagcaaaacaaaattagaaagtgatagaggtagacttctagccgctggtaaggatgatatattcgacttcaaatgtgtggatttcggcgcctattttatagctatgcgattggataagaaaacatatctgccgcaagctattaggcgaggtactggagacgcgtggatggttaaaaaggcggcaaaggtcgatccatctgctcaacaattttgtcagtatttgataaaacacaagtctaataatgttattacttgtggtaatgagatgttaaatgaattaggttatagcggttattttatgtcaccgcattggtgttccgattttagtaatatggaatagtgttagataaatgcggtaacgaatgttcctgtaaggaaccataacagtttagatttaacgttaaagatgagcataaacataataaacaaaattacaatcaaacctataacattaatatcaaacaatccaaaaaatgaaatcagtggagtagtaaacgcgtacataactcctggataacgtttagcagctgccgttcctattctagaccaaaaattcggtttcatgttttcgaagcggtgttctgcaacaagtcggggatcgtgttctacatatttggcggcgttatccagtatctgcctattgatcttcatttcgttttcgattctggctatttcaaaataaaatcccgatgatagacctccagactttataatttcatctacgatgttcagcgccgtagtaactctaataatataggctgataagctaacatcataccctcctgtatatgtgaatatggcatgatttttgtccattacaagctcggttttaactttattgcctgtaataatttctctcatctgtaggatatctatttttttgtcatgcattgccttcaagacgggacgaagaaacgtaatatcctcaataacgttatcgttttctacaataactacatattctacctttttattttctaactcggtaaaaaaattagaatcccatagggctaaatgtctagcgatatttcttttcgtttcctctgtacacatagtgttacaaaaccctgaaaagaagtgagtatacttgtcatcatttctaatgtttcctccagtccactgtataaacgcataatccttgtaatgatctggatcatccttgactaccacaacatttcttttttctggcataacttcgttgtcctttacatcatcgaacttctgatcattaatatgctcatgaacattaggaaatgtttctgatggaggtctatcaataactggcacaacaataacaggagttttcaccgccgccatttagttattgaaattaatcatatacaactctttaatacgagttatattttcgtctatccattgtttcacatttacatatttcgacaaaaagatataaaatgcgtattccaatgcttctctgtttaatgaattactaaaatatacaaacacgtcactgtctggcaataaatgatatcttagaatattgtaacaatttattttgtattgcacatgttcgtgatctatgagttcttcttcgaatggcataggatctccgaatctgaaaacgtataaataggagttagaataataatatttgagagtattggtaatatataaactctttagcggtataattagtttttttctctcaatttctatttttagatgtgatggaaaaatgactaattttgtagcattagtatcatgaactctaatcaaaatcttaatatcttcgtcacacgttagctctttgaagtttttaagagatgcatcagttggttctacagatggagtaggtgcaacaattttttgttctacacatgtatgtactggagccattgttttaactataatggtgcttgtatcgaaaaactttaatgcagatagcggaagctcttcgccgcgactttctacatcgtaattgggttctaacgccgatctctgaatggatactagttttctaagttctaatgtgattctctgaaaatgtaaatccaattcctccggcattatagatgtgtatacatcggtaaataaaactatagtatccaacgatcccttctcgcaaattctagtcttaaccaaaaaatcgtatataaccacggagatggcgtatttaagagtggattcttctaccgttttgttcttggatgtcatataggaaactataaagtccgcactactgttaagaatgattactaacgcaactatatagttcaaattaagcattttggaaacataaaataactctgtagacgatacttgactttcgaataagtttgcagacaaacgaagaaagaacagacctctcttaatttcagaagaaaactttttttcgtattcctgacgtctagagtttatatcaataagaaagttaagaattagtcggttaatgttgtatttcattacccaagtttgagatttcataatattatcaaaagacatgataatattaaagataaagcgctgactatgaacgaaatagctatatggttcgctcaagaatatagtcttgttaaacgtggaaacgataactgtatttttaatcacgtcagcggcatctaaattaaatataggtatatttattccacacactctacaatatgccacaccatcttcataataaataaattcgttagcaaaattattaattttagtgaaatagttagcgtcaactttcatagcttccttcaatctaatttgatgctcacacggtgcgaattccactctaacatcccttttccatgcctcaggttcatcgatctctataatatctagtttcttgcgtttcacaaacacgggctcgtctctcgcgatgagatctgtatagtaactatgtaaatgataactagatagaaagatgtagctatatagatgacgatcctttaagagaggtataataactttaccccaatcagataaactattgttatggtcttcggaaaaagaatttttataaatttttccagtattttccaaatatacgtacttgacatctaaaaaatccttaatgataataggaatggataatccgtctattttataaagaaatacatatcgcacattatacttttttttggaaatgggaataccgatgtgtctacataaatatgcaaagtctaaatattttttagagaatcttagttggtccaaattcttttccaagtacggtaatagatttttcatattgaacggtatcttcttaatctctggttctagttccgcattaaatgatgaaactaagtcactatttttataactaacgattacatcacctctaacatcatcatttaccagaatactgatcttcttttgtcgtaaatacatgtctaatgtgttaaaaaaaagatcatacaagttatacgtcatttcatctgtggtattcttgtcattgaaggataaactcgtactaatctcttctttaacagcctgttcaaatttatatcctatatacgaaaaaatagcaaccagtgtttgatcatccgcgtcaatattctgttctatcgtagtgtataacaatcgtatatcttcttctgtgatagtcgatacgttataaaggttgataacgaaaatatttttatttcgtgaaataaagtcatcgtaggattttggacttatattcgcgtctagtagatatgcttttatttttggaatgatctcaattagaatagtctctttagagtccatttaaagttacaaacaactaggaaattggtttatgatgtataatttttttagtttttatagattctttattctatacttaaaaaatgaaaataaatacaaaggttcttgagggttgtgttaaattgaaagcgagaaataatcataaattatttcattatcgcgatatccgttaagtttgtatcgtaatggcgtggtcaattacaaataaagcggatactagtagcttcacaaagatggctgaaatcagagctcatctaaaaaatagcgctgaaaataaagataaaaacgaggatattttcccggaagatgtaataattccatctactaagcccaaaaccaaacgagccactactcctcgtaaaccagcggctactaaaagatcaaccaaaaaggaggaagtggaagaagaagtagttatagaggaatatcatcaaacaactgaaaaaaattctccatctcctggagtcagcgacattgtagaaagcgtggccgctgtagagctcgatgatagcgacggggatgatgaacctatggtacaagttgaagctggtaaagtaaatcatagtgctagaagcgatctttctgacctaaaggtggctaccgacaatatcgttaaagatcttaagaaaattattactagaatctctgcagtatcgacggttctagaggatgttcaagcagctggtatctctagacaatttacttctatgactaaagctattacaacactatctgatctagtcaccgagggaaaatctaaagttgttcgtaaaaaagttaaaacttgtaagaagtaaatgcgtgcacttttttataaagatggtaaactctttaccgataataattttttaaatcctgtatcagacgataatccagcgtatgaggttttgcaacatgttaaaattcctactcatttaacagatgtagtagtatatgaacaaacgtgggaggaggcgttaactagattaatttttgtgggaagcgattcaaaaggacgtagacaatacttttacggaaaaatgcatgtacagaatcgcaacgctaaaagagatcgtatttttgttagagtatataacgttatgaaacgaattaattgttttataaacaaaaatataaagaaatcgtccacagattccaattatcagttggcggtttttatgttaatggaaactatgttttttattagatttggtaaaatgaaatatcttaaggagaatgaaacagtagggttattaacactaaaaaataaacacatagaaataagtcccgatgaaatagttatcaagtttgtaggaaaggacaaagtttcacatgaatttgttgttcataagtctaatagactatataagccgctattgaaactgacggatgattctagtcccgaagaatttctgttcaacaaactaagtgaacgaaaggtatacgaatgtatcaaacagtttggtattagaatcaaggatctccgaacgtatggagtcaattatacgtttttatataatttttggacaaatgtaaagtccatatctcctcttccatcaccaaaaaagttaatagcgttaactatcaaacaaactgctgaagtggtaggtcatactccatcaatttcaaaaagagcttacatggcaacgactattttagaaatggtaaaggataaaaattttttagatgtagtatctaaaactacgttcgatgaattcctatctatagtcgtagatcacgttaaatcatctacggatggatgatatagatctttacacaaataattacaagaccgataaatggaaatggataagcgtatgaaatctctcgcaatgacagctttcttcggagagctaaacacattagatattatggcattgataatgtctatatttaaacgccatccaaacaataccattttttcagtggataaggatggtcagtttatgattgatttcgaatacgataattataaggcttctcaatatttggatctgaccctcactccgatatctggagatgaatgcaagactcacgcatcgagtatagccgaacaattggcgtgtgtggatattattaaagaggatattagcgaatatatcaaaactactccccgtcttaaacgatttataaaaaaataccgcaatagatcagatactcgtatcagtcgagatacagaaaagcttaaaatagctctagctaaaggcatagattacgaatatataaaagacgcttgttaataagtaaatgaaaaaaaactagtcgtttataataaaacacaatatggatgccaacatagtatcatcttctactattgcaacgtatatagacgctttagcaaagaatgcttcagaattagaacagaggtctaccgcatacgaaataaataatgaattggaactagtatttattaagccgccattaattactttgacaaatgtagtgaatatctctacgattcaggaatcgtttattcgatttaccgttactaataaggaaggtgtcaaaattagaactaagattccattatctaaggtacatggtctagatgtaaaaaatgtacagttagtagatgctatagataacatagtttgggaaaagaaatcattagtgacggaaaatcgtcttcacaaagaatgcttgttgagactatcgacagaggaacgtcatatatttttggattacaagaaatatggatcctctatccgactagaattagtcaatcttattcaagcaaaaacaaaaaactttacgatagactttaagctaaaatattttctaggatccggtgcccaatctaaaagttctttgttgcacgctattaatcatccaaagtcaaggcctaatacatctctggaaatagaattcacacctagagacaatgaaaaagttccatatgatgaactaataaaggaattgacgactctatcacgtcatatatttatggcttctccagagaatgtaattctttctccgcctattaacgcacctataaagacttttatgttgcctaaacaagatatagtaggtctggatctggaaaatctatatgccgtaactaagactgacggcattcctataactatcagagttacatcaaacgggttgtattgttattttacacatcttgggtatattattagatatccagttaagagaataatagattccgaagtagtagtctttggtgaggcagttaaggataagaactggaccgtatatctcattaagctaatagagcctgtgaatgcaatcaatgatagactagaagaaagtaagtatgttgaatctaaactagtggatatttgtgatcggatagtattcaagtcaaagaaatatgaaggtccgtttactacaactagtgaagtcgtcgatatgttatctacatatttaccaaagcaaccagaaggtgttattctgttctattcaaagggacctaaatctaacattgattttaaaattaaaaaggaaaatactatagaccaaactgcaaatgtagtatttaggtacatgtccagtgaaccaattatctttggagaatcgtctatctttgtagagtataagaaatttagcaacgataaaggctttcctaaagaatatggttctggtaagattgtgttatataacggcgttaattatctaaataatatctattgtttggaatatattaatacacataatgaagtgggtattaagtccgtggttgtacctattaagtttatagcagaattcttagttaatggagaaatacttaaacctagaatcgataaaaccatgaaatatattaactcagaagattattatggaaatcaacataatatcatagtcgaacatttaagagatcaaagcatcaaaataggagatatctttaacgaggataaactatcggatgtgggacatcaatacgccaataatgataaatttagattaaatccagaagttagttattttacgaataaacgaactagaggaccgttgggaattttatcaaactacgtcaagactcttcttatttctatgtattgttccaaaacatttttagacgattccaacaaacgaaaggtattggcgattgattttggaaacggtgctgacctggaaaaatacttttatggagagattgcgttattggtagcgacggatccggatgctgatgctatagctagaggaaatgaaagatacaacaaattaaactctggaattaaaaccaagtactacaaatttgactacattcaggaaactattcgatccgatacatttgtctctagtgtcagagaagtattctattttggaaagtttaatatcatcgactggcagtttgctatccattattcttttcatccgagacattatgctaccgtcatgaataacttatccgaactaactgcttctggaggcaaggtattaatcactaccatggacggagacaaattatcaaaattaacagataaaaagacttttataattcataagaatttacctagtagcgaaaactatatgtctgtagaaaaaatagctgatgatagaatagtggtatataatccatcaacaatgtctactccaatgactgaatacattatcaaaaagaacgatatagtcagagtgtttaacgaatacggatttgttcttgtagataacgttgatttcgctacaattatagaacgaagtaaaaagtttattaatggcgcatctacaatggaagatagaccgtctacaaaaaactttttcgaactaaatagaggagccattaaatgtgaaggtttagatgtcgaagacttacttagttactatgttgtttatgtcttttctaagcggtaaataataatatggtatgggttctgatatccccgttctaaatgcattaaataattccaatagagcgatttttgttcctataggaccttccaactgtggatactctgtattgttaatagatatattaatacttttgtcgggtaacagaggttctacgtcttctaaaaataaaagtttgataacatctggcctgttcataaataaaaacttggcgattctatatatactcttattatcaaatctagccattgtcttatagatgtgagctactgtaggtgtaccatttgattttctttctaatactatatatttctctcgaagaagttcttgcacatcatctgggaataaaatactactgttgagtaaatcagttattttttttatatcgatattgatggacatttttatagttaaggataataagtatcccaaagtcgataacgacgataacgaagtatttatacttttaggaaatcacaatgactttatcagatcaaaattaacaaaattaaaggagcatgtatttttttctgaatatattgtgactccagatacatatggatctttatgcgtcgaattaaatgggtctagttttcagcacggtggtagatatatagaggtggaggaatttatagatgctggaagacaagttagatggtgttctacatccaatcatatatctgaagatatacccgaagatatacacactgataaatttgtcatttatgatatatacacttttgacgctttcaagaataaacgattggtattcgtacaggtacctccgtcgttaggagatgatagctatttgactaatccgttattgtctccgtattatcgtaattcagtagccagacaaatggtcaatgatatgatttttaatcaagattcatttttaaaatatttattagaacatctgattagaagccactatagagtttctaaacatataacaatagttagatacaaggataccgaagaattaaatctaacgagaatatgttataatagagataagtttaaggcgtttgtattcgcttggtttaacggcgtttcggaaaatgaaaaggtactagatacgtataaaaaggtatctaatttgatataatgaattcagtgactgtatcacacgcgccatatactattacttatcacgatgattgggaaccagtaatgagtcaattggtagagttttataacgaagtagccagttggctgctacgagacgagacgtcgcctattcctgataagttctttatacagttgaaacaaccgcttagaaataaacgagtatgtgtgtgcggtatagatccgtatccgaaagatggaactggtgtaccgttcgaatcaccaaattttacaaaaaaatcaattaaggagatagcttcatctatatctagattaaccggagtaattgattataaaggttataaccttaatataatagacggggttataccctggaattattacttaagttgtaaattaggagaaacaaaaagtcacgcgatctactgggataagatttccaagttactgctgcagcatataactaaacacgttagtgttctttattgtttgggtaaaacagatttctcgaatatacgggcaaagttagaatccccggtaactaccatagtgggatatcatccagcggctagagaccgtcaattcgagaaagatcgatcatttgaaattatcaacgttttactggaattagacaacaaggtacctataaattgggctcaagggtttatttattaatgctttagtgaaattttaacttgtgttctaaatggatgcggctattagaggtaatgatgttatctttgttcttaagactataggtgtcccgtcagcgtgcagacaaaatgaagatccaagatttgtagaagcatttaaatgcgacgagttagaaagatatattgagaataatccagaatgtacactattcgaaagtcttagggatgaggaagcatactctatagtcagaattttcatggatgtagatttagacgcgtgtctagacgaaatagattatttaacggctattcaagattttattatcgaggtgtcaaactgtgtagctagattcgcgtttacagaatgcggcgccattcatgaaaatgtaataaaatccatgagatctaatttttcattgactaagtctacaaatagagataaaacaagttttcatattatctttttagacacgtataccactatggatacattgatagctatgaaacgaacactattagaattaagtagatcatctgaaaatccactaacaagatcgatagacactgccgtatataggagaaaaacaactcttcgggttgtaggtactaggaaaaatccaaattgcgacactattcatgtaatgcaaccacctcatgataatatagaagattacctattcacttacgtggatatgaacaacaatagttattacttttctctacaacgacgattggaggatttagttcctgataagttatgggaaccagggtttatttcattcgaagacgctataaaaagagtttcaaaaatattcattaattctataataaactttaatgatctcgatgaaaataattttacaacggtaccactggtcatagattacgtaacaccttgtgcattatgtaaaaaacgatcgcataaacatccgcatcaactatcgttggaaaatggtgctattagaatttacaaaactggtaatccacatagttgtaaagttaaaattgttccgttggatggtaataaactgtttaatattgcacaaagaattttagacactaactctgttttattaaccgaacgaggagaccatatagtttggattaataattcatggaaatttaacagcgaagaacccttgataacaaaactaattttgtcaataagacatcaactacctaaggaatattcaagcgaattactctgtccaagaaaacgaaagactgtagaagctaacatacgagacatgttagtagattcagtggagaccgatacctatccggataaacttccgtttaaaaatggtgtattggacctggtagacggaatgttttactctggagatgatgctaaaaaatatatgtgtactgtatcaaccggatttaaatttgacgatacaaagttcgtcgaagacagtccagaaatggaagagttaatgaatatcattaacgatatccaaccattaacggatgaaaataagaaaaatagagagctatatgaaaaaacattatctagttgtttatgcggtgctaccaaaggatgtttaacattcttttttggagaaactgcaactggaaagtcgacaaccaaacgtttgttaaagtctgctatcggtgacctgtttgttgagacgggtcaaacaattttaacagatgtattggataaaggacctaatccatttatcgctaacatgcatttgaaaagatctgtattctgtagcgaactacctgattttgcatgtagtgggtcaaagaaaatcagatctgataatattaaaaagttgacagaaccttgtgtcattggaagaccgtgtttctccaataaaattaataatagaaaccatgcgacaatcattatcgatactaattacaaacctgtttttgataggatagataacgcattaatgagaagaattgccgtcgtgcgattcagaacacacttttctcaaccttctggtagagaggctgctgaaaataatgacgcgtacgataaagtcaaactattagacgaggggttagatggtaaaatacaaaataatagatatagattcgcatttctatacttgttggtgaaatggtacagaaaatatcatgttcctattatgaaactatatcctacacccgaagagattcctgactttgcattctatctcaaaataggtactctgttggtatctagctctgtaaagcatattccattaatgacggacctctccaaaaagggatatatattgtacgataatgtggtcactcttccgttgactactttccaacagaaaatatccaagtattttaattctagactatttggacacgatatagagagcttcatcaatagacataagaaatttgccaatgttagtgatgaatatctgcaatatatattcatagaggatatttcatctccgtaaatatatgctcatatatttatagaagatatcacatatctaaatgaataccggaattatagatttatttgataatcatgttgatagtataccaactatattacctcatcagttagctactctagattatctagttagaactatcatagatgagaacagaagcgtgttattgttccatattatgggatcaggtaaaacaataatcgctttgttgttcgccttggtagcttccagatttaaaaaggtttacattctagtgccgaacatcaacatcttaaaaattttcaattataatatgggtgtagctatgaacttgtttaatgacgaattcatagctgagaatatctttattcattccacaacaagtttttattctcttaattataacgataacgtcattaattataacggattatctcgctacaataactctatttttatcgttgatgaggcacataatatctttgggaataatactggagaacttatgaccgtgataaaaaataaaaacaagattccttttctactattgtctggatctcccattactaacacacctaatactctgggtcatattatagatttaatgtccgaagagacgatagattttggtgaaattattagtcgtggtaagaaagtaattcagacacttcttaacgaacgcggtgtgaatgtacttaaggatttgcttaaaggaagaatatcatattacgaaatgcctgataaagatctaccaacgataagatatcacggacgtaagtttctagatactagagtagtatattgtcacatgtctaaacttcaagagagagattatatgattactagacgacagctatgttatcatgaaatgtttgataaaaatatgtataacgtgtcaatggcagtattgggacaacttaatctgatgaataatttagatactttatttcaggaacaggataaggaattgtacccaaatctgaaaataaataatggcgtgttatacggagaagaattggtaacgttaaacattagttccaaatttaaatactttattaatcggatacagacactcaacggaaaacattttatatacttttctaattctacatatggcggattggtaattaaatatatcatgctcagtaatggatattctgaatataatggttctcagggaactaatccacatatgataaacggcaaaccaaaaacatttgctatcgttactagtaaaatgaaatcgtctttagaggatctattagatgtgtataattctcctgaaaacgatgatggtagtcaattgatgtttttgttttcatcaaacattatgtccgaatcctatactctaaaagaggtaaggcatatttggtttatgactatcccagatactttttctcaatacaaccaaattcttggacgatctattagaaaattctcttacgccgatatttctgaaccagttaatgtatatcttttagccgccgtatattccgatttcaatgacgaagtgacgtcattaaacgattacacacaggatgaattaattaatgttttaccatttgacatcaaaaagctgttatatctaaaatttaagacgaaagaaacgaatagaatatactctattcttcaagagatgtctgaaacgtattctcttccaccacatccatcaattgtaaaagttttattgggagaattggtcagacaatttttttataataattctcgtattaagtataacgataccaagttacttaaaatggttacatcagttataaaaaataaagaagacgctaggaattacatagatgatattgtaaacggtcacttctttgtatcgaataaagtatttgataaatctcttttatacaaatacgaaaacgatattattacagtaccgtttagactttcctacgaaccatttgtttggggagttaactttcgtaaagaatataacgtggtatcttctccataaaactgatgagatatataaagaaataaatgtcgagctttgttaccaatggataccttccagttacattggagccacacgagctgacgttagacataaaaactaatattaggaatgccgtatataagacgtatctccatagagaaattagtggtaaaatggccaagaaaatagaaattcgtgaagacgtggaattacctctcggcgaaatagttaataattctgtagttataaacgttccgtgtgtaataacctacgcgtattatcacgttggggatatagttagaggaacattaaacatcgaagatgaatcaaatgtaactattcaatgtggagatttaatctgtaaactaagtagagattcgggtactgtatcatttagcgattcaaagtactgcttttttcgaaatggtaatgcgtatgacaatggcagcgaagtcactgccgttctaatggaggctcaacaaggtatcgaatctagttttgtttttctcgcgaatatcgtcgactcataagaaagagaatagcggtaagtataaacacgaatactatggcaataattgcgaatgttttattcccttcgatatatttttgataatatgaaaaacatgtctctctcaaatcggacaaccatctcataaaatagttatctcgcgctggcgaggtggttgccgctcgtataatctccccagaataatatacttgcgtgtcgtcgttcaatttatacggatttctatagttctctgttatataatgcggttttccatcatgattagacgacgacaatagtgttctaaatttagatagttgatcagaatgaatgtttattggcgttggaaaaattatccatgctgcgtctgcagagtggttgatagttgttcctagatatgtaaaataatccaacgtactaggtagcaaattgtctagataaaatactgaatcaaacggcgcagacgtattagcggatctaatggaatccaattgattgactatcttttgaaaatatacatttttatgatccgatacttgtaagaatatagaaataatgataagtccatcatcgtgtttttttgcctcttcataagaactatattttttcttattccaatgaacaagattaatctctccagagtatttgtacacatctatcaagtgattggatccataatcgtcttcctttccccaatatatatgtagtgatgataacacatattcattggggagaaaccctccacttatatatcctcctttaaaattaatccttactagttttccagtgttctggatagtggttggtttcgactcattataatgtatgtctaacggcttcaatcgcgcgttagaaattgcttttttagtttctatattaataggagatagttgttgcggcatagtaaaaatgaaatgataactgtttaaaaatagctcttagtatgggaattacaatggatgaggaagtgatatttgaaactcctagagaattaatatctattaaacgaataaaagatattccaagatcaaaagacacgcatgtgtttgctgcgtgtataacaagtgacggatatccgttaataggagctagaagaacttcattcgcgttccaggcgatattatctcaacaaaattcagattctatctttagagtatccactaaactattacggtttatgtactacaatgaactaagagaaatctttagacggttgagaaaaggttctatcaacaatatcgatcctcactttgaagagttaatattattgggtggtaaactagataaaaaggaatctattaaagattgtttaagaagagaattaaaagaggaaagtgatgaacgtataacagtaaaagaatttggaaatgtaattctaaaacttacaacacgggataaattatttaataaagtatatataggttattgcatggcgtgttttattaatcaatcgttggaggatttatcgcatactagtatttacaatgtagaaattagaaagattaaatcattaaatgattgtattaacgacgataaatacgaatatctgtcttatatttataatatgctagttaatagtaaatgaacttttacagatctagtataattagtcagattattaagtataatagacgactagctaagtctattatttgcaaggatgactctcaaattattacactcacggcattcgttaaccaatgcctatggtgtcataaacgagtatccgtgtccgctattttattaactactgataacaaaatattagtatgtaacagacgagatagttttctctattctgaaataattagaactagaaacatgtttagaaagaaacgattatttctgaattattccaattatttgtccaaacaggaaagaagtatactatcgtcatttttttctctatatccagctactgctgataatgatagaatagacgctatttatccgggtggcatacccaaaaggggtgagaatgttccagagtgtctatccagggaaatcaaagaagaagttaatatagacaattcttttgtattcatagacactcggttttttattcatggtatcatagaagataccattatcaacaaattttttgaggtaattttctttgtcggaagaatatctctaacgagtgatcaaattattgatacctttaaaagtaatcatgaaatcaaggatctaatatttttagatccgaattcaggtaatggactccaatacgaaattgcaaaatatgctctagatactgcaaaacttaaatgttacggccatagaggatgttattatgaatcattaaaaaaattaactgaggatgattgattagaaaatataaattaatttaccatcgtgtatttttataacgggattgtccggcatatcatgtagatagttaccgtctacatcgtatactcgaccatctacgcctttaaatcctctatttattgacattaatctattagaattggaataccaaatattagtaccctcaattagtttattggtaatattttttttagacgatagatcgatggctcttgaaaccaaggttttccaaccggactcattgtcgatcggtgagaagtctttttcattagcatgaatccattctaatgatgtatgtttaaacactctaaacaattggacaaattcttttgatttgctttgaatgatttcaaataggtcttcgtctacagtaggcataccattagataatctagccattataaagtgcacgtttacatatctacgttctggaggagtaagaacgtgactattgagacgaatggctcttcctactatctgacgaagagacgcctcgttccatgtcatatctaaaatgaagatatcattaattgagaaaaaactaataccctcgcctccactagaagagaatacgcatgttttaatgcattctccgttagtgtttgattcttggttaaactcagccaccgccttgattctagtatcttttgttctagatgagaactctatattagagataccaaagactttgaaatatagtaataagatttctattcctgactgattaacaaatggttcaaagactagacatttaccatgggatgctaatattcccaaacatacatctataaatttgacgcttttctcttttaattcagtaaatagagagatatcagccgcactagcatcccctttcaatagttctccctttttaaaggtatttaatgcggatttagaaaactctctatctcttaatgaatttttaaaatcattatatagtgttgctatctcttgcgcgtattcgccgggatcacgattttgtctttcaggaaagctatcgaacgtaaacgtagtagccatacgtctcagaattctaaatgatgatataccagtttttatttctgcgagtttagccttttgataaatctcttcttgcttttttgacatattaacgtatcgcattaatactgttttcttagcgaatgatgcagacccttctacgttatcaaaaatagaaaactcgttattaactatgtacgaacataggcctcctagtttggagactaattctttttcatcgactagacgtttattctcaaatagtgattggtgttgtaaggatcctggtcgtagtaagttaaccaacatggtgaattcttgcacactattgacgataggtgtagccgataaacaaatcatcttatggttttttaatgcgatggtcttggataaaaaattatatactgaacgagtaggacggatcttaccatcttctttgattaatgatttagaaatgaagttatgacattcatcaataatgacgcatattctactcttggaattaatagttttgatattagtaaaaaatttatttctaaaattttgatcatcgtaattaataaaaatacaatccttcgttatctctggagcgtatctgagtatagtgttcatccaaggatcttctatcaaagcctttttcaccaataagataatagcccaattcgtataaatatccttaagatgtttgagaatatatacagtagtcattgttttaccgacacccgtttcatggaacaataaaagagaatgcatactgtctaatcctaagaaaactcttgctacaaaatgttgataatccttgaggcgtactacgtccgaccccatcatttcaacgggcatattagtagttctgcgtaaggcataatcgatataggccgcgtgtgatttactcatttatgagtgataagtaataactatgttttaaaaatcacagcagtagtttaactagtcttctctgatgtttgttttcgatactttttgaatcagaagtcatactagaataaagcaacgagtgaacgtaatagagagcttcgtatactctattcgaaaactctaagaacttattaatgaattccgtatccactggattgtttaaaatactaaattgaacactgttcacatccttccaagaagaagacttagtgacggacttaacatgagacataaataaatccaaattttttttacaaacatcactagccaccataatggcgctatctttcaaccagctatcgcttacgcattttagcagtctaacatttttaaagagactacaatatattctcatagtatcgattacacctctaccgaataaagttggaagtttaataatacaatatttttcgtttacaaaatcaaataatggtcgaaacacgtcgaaggttaacatcttataatcgctaatgtatagattgttttcagtgagatgattattagatttaatagcatctcgttcacgtttgaacagtttattgcgtgcgctgaggtcggcaactacggcgtccgctttagtactcctcccataatactttacgctattaatctttaaaatttcatagactttatctagatcgctttctggtaacatgatatcatgtgtaaaaagttttaacatgtcggtcggcattctatttagatcattaactctagaaatctgaagaaagtaattagctccgtattccagactaggtaatgggcttttacctagagacagattaagttctggcaatgtttcataaaatggaagaaggacatgcgttccctcccggatattttttacaatttcatccatttacaactctatagtttgttttcattattattagttattatctcccataatcttggtaatacttaccccttgatcgtaagataccttatacaggtcattacatacaactaccaattgtttttgtacataatagattggatggttgacatccatggtggaataaactactcgaacagatagtttatctttccccctagatacattggccgtaatagttgtcggcctaaagaatatctttggtgtaaagttaaaagttagggttcttgttccattattgctttttgtcagtagttcattataaattctcgagatgggtccgttctctgaatatagaacatcatttccaaatctaacttctagtctagaaataatatcggtcttattcttaaaatctattcccttgatgaagggatcgttaatgaacaaatccttggcctttgattcggctgatctattatctccgttatagacgttacgttgactagtccaaagacttacaggaatagatgtatcgatgatgttgatactatgtgatatgtgagcaaagattgttctcttagtggcatcactatatgttccagtaatggcggaaaactttttagaaatgttatatataaaagaattttttcgtgttccaaacattagcagattagtatgaagataaacactcatattatcaggaacattatcaatttttacatacacatcagcatcttgaatagaaacgataccatcttctggaacctcaacaatctcggcagactccggataaccagtcggtggaccatcgctaacaataactagatcatccaacaatctactcacatatgcatctatataatctttttcatcttgtgagtaccctggatacgaaataaatttattatccgtatttccataataaggtttagtataaacagagagcgatgttgccgcatgaacttcagttacagtcgccgttggttggtttatttgacctattactctcctaggtttctctataaacgatggtttaatttgtacattcttaaccatatatccaataaagctcaattcaggaacataaacaaattctttgttgaacgtttcaaagtcgaacgaagagtcacgaataacgatatcggatactggattgaaggttaccgttacggtaatttttgaatcggatagtttaagactgctgaatgtatcttccacatcaaacggagttttaatataaacgtatactgtagatggttctttaatagtgtcattaggagttaggccaatagaaatatcattaagttcactagaatatccagagtgtttcaaagcaattgtattattgatacaattattatataattcttcgccctcaatttcccaaataacaccgttacacgaagagatagatacgtgattaatacatttatatccaacatatggtacgtaaccgaatcttcccatacctttaacttctggaagttccaaactcagaaccaaatgattaagcgcagtaatatactgatccctaatttcgaagctagcgatagcctgattgtctggaccatcgtttgtcataactccggatagagaaatatattgcggcatatataaagttggaatttgactatcgactgcgaagacattagaccgtttaatagagtcatccccaccgatcaaagaattaatgatagtattattcattttctatttaaaatggaaaaagcttacaataaactccgtagagaaatatctataatttgtgagttttccttaaagtaacagcttccgtaaacgccgtctttatctcttagtaagtttattgtatttataaccttttccttatcttcatagaatactaaaggcaacaaagaaatttttggttcttctctaagagctacgtgagacttaaccatagaagccaacgaatccctacatattttagaacagaaataccctacttcaccacccttgtatgtctcaatactaataggtctaaaaaccaaatcttgattacaaaaccaacacttatcaattacactatttgtcttaatagacacatctgccatagatttataatactttggtagtatacaagcgagtgcttcttctttagcgggcttaaagactgctttaggtgctgaaataaccacatctggaaggcttactcgcttagccatttaattacggaactatttttttatacttctaatgagcaagtagaaaacctctcatctacaaaaacatactcgtgtccataatcctctaccatagttacacgttttttagatctcatatgtgctaaaaagttttcccatactaattggttactattatttttcgtataatttttaacagtttgaggttttagatttttagttacagaagtgatatcgaatattttatccaaaaagaatgaataattaattgtcttagaaggagtgttttcttggcaaaagaataccaagtgcttaaatatttctactacttcattaatcttttctgtactcagattcagtttctcatcttttacttgattgattatttcaaagactaacttataatcctttttatttattctctcgttagccttaagaaaactagatacaaaatttgcatctacatcatccgtggatatttgatttttttccatgatatccaagagttccgagataatttctccagaacattgatgagacaataatctccgcaatacatttctcaaatgaataagtttattagacacgtggaagtttgactttttttgtacctttgtacatttttgaaataccgactcgcaaaaaatacaatattcatatccttgttcagatactataccgttgtgtctacaaccgctacataatcgtagattcatgttaacactctacgtatctcgtcgtccaatattttatataaaaacattttatttctagacgttgccagaaaatcctgtaatacttttagttttttgggctgtgaataaagtatcgccctaatatggttaccgtcctccgccaatatagtagttaaattatccgcacatgcaaaagaacaccgcttaggcggattcagtacaatgttatatttttcgtaccaactcatttaaatatcataatctaaaatagttctgtaatatgtctagcgctaatatattgatcataatcctgtgcataaattaagatacaacaatgtctcgaaatcatcgacatggcttcttccatagttagaagatcgtcgtcaaagttagcaacgtgattcatcaacatttgctgttttgaggcagcaaatactgaaccgtcgccattcaaccattcataaaaaccatcgtctgaatccattgataatttcttgtactggtttttgagagctcgcatcaatctagcatttctagctcccggattgaaaacagaaagaggatcgtacatccagggtccattttctgtaaatagaatcgtataatgtcccttcaagaagatatcagacgatccacaatcaaagaattggtctccgagtttgtaacaaactgcggactttaacctatacatgataccgtttagcataatttctggtgatacgtcaatcggagtatcatctattagagatctaaagccggtgtaacattctccaccaaacatattcttattctgacgtcgttctacataaaacatcattgctccattaacgataacaggggaatgaacagcactacccatcacattagttcccaatggatcaatgtgtgtaactccagaacatcttccatagcctatgttaggaggagcgaacaccactcttccactattgccatcgaatgccatagaataaatatccttggaattgatagaaatcggactgtcggatgttgtgatcatcttcataggattaacaacgatgtatggtgccgcctgaagtttcatatcgtaactgatgccgttcataggtctagccacagaaaccaacgtaggtctaaatccaactatagacaaaatagaagccaatatctgttcctcatctgtcataacttgagagcatccagtatgaataatcttcattagatggggatctaccgcatcatcatcgttacaataaaaaattcccattctaatgttcataattgcttttctaatcatggtatgcatgtttgctctctgaatctctgtggaaattagatctgatacacctgtaatcactatcggattatcctccgtaagacgattaaccaacaacatataattataagactttacttttctaaattcataaagttgctggattaggctataggtgtctccatgtacatacgcgttctcgagcgcaggaagtttaataccgaatagtgccatcagaataggatgaatatagtaattagtttctggttttctataaataaaagacaaatcttgtgaactagacatatcggtaaaatgcatggattggaatcgtgtagtcgacagaagaatatgatgattagatggagagtatattttatctaactctttgagttggtcaccgattctaggactagctcgagaatgaataagtactaaaggatgagtacatttcacagaaacactagcattgttcaatgtgctctttacatgggtaaggagttgaaatagctcgtttctatttgttctgacaatatttagtttattcataatgttaagcatatcctgaatagtaaagttagatgtgtcatacttgttagtagttagatatttagcaattgcattcccatcatttctcaatctcgtactccaatcatgcgtggatgctacttcgtcgatggaaaccatacaatcctttttgataggctgttgagattgattatttcctgcacgtttaggtttggtacgttgatttctagcccctgcggatataaagtcatcgtctacaatttgggacaatgaattgcatacactacaagacaaagatttatcagaagtgtgaatatgatcttcatctaccaaagaaagagtttgattagtataactagattttagtcctgcgttagatgttaaaaaaacatcgctattgaccacggcttccattatttatattcgtagtttttactcgaaagcgtgattttaatatccaatcttattacttttggaatcgttcaaaacctttgactagttgtagaatttgatctattgccctacgcgtatactcccttgcatcatatacgttcgtcaccagatcgtttgtttcggcctgaagttggtgcatatctttttcaacactcgacatgagatccttaagggccatatcgtctagattttgttgagatgctgctcctggatttggattttgttgtgctgttgtacatactgtaccaccagtaggtgtaggagtacatacagtggccacaataggaggttgaggaggtgtaaccgttggagtagtacaagaaatatttccatccgattgttgtgtacatgtagttgttggtaacgtctgagaaggttgggtagatggcggtgtcgtcgtcttttgatctttattaaatttagagataatatcctgaacagcattgctcggcgtcaacgctggaaggagtgaactcgccggcgcatcagtatctgcagacagccaatcaaaaagattagacatatcagatgatgtattagtttgttgtcgtggttttggtgtaggagcagtactactaggtagaagaataggagccgatgtaggtgtcggaaccggctgtggagttatatgaatagttggttgtagcggttggataggctgtctgctggcggccatcatattatctctagctagttgttctcgcaactgtctttgataatacgactcttgagactttagtcctatttcaatcgcttcatcctttttcgtatccggatccttttcttcagaataatagattgacgactttggtgtagaggattctgccagcccctgtgagaacttgttaaagaagtccatttaaggctttaaaattgaattgcgattataagattaaatggcagacacagacgatattatcgactatgaatccgatgatctcactgaatacgaggatgatgaagaagaggaagaagatggagagtcactagaaactagtgatatagatcccaaatcttcttataagattgtagaatcagcatccactcatatagaagatgcgcattccaatcttaaacatatagggaatcatatatctgctcttaaacgacgctatactagacgtataagtctatttgaaatagcgggtataatagcagaaagctataacttgcttcaacgaggaagattacctctagtttcagaattttctgacgaaacgatgaagcaaaatatgctacatgtaattatacaagagatagaggagggttcttgtcctatagtcatcgaaaagaacggagaattgttgtcggtaaacgattttgacaaagatggtctaaaattccatctagactatattatcaaaatttggaaacttcaaaaacgatattagaatttatacgaatatcgttctctaaatgtcacaatcaagtctcgcatgttcagcaatttattgtcgtactttatatcgtgttcattaacgatatcttgcaaaatagtaatgattctatcttccttcgatagatattcttcagagattattgtcttatattctttcttgttatcagatatgaatttgataagactttgaacattattgatacccgtctgtttaattttttctacagatattttagttttggcagattctatcgtatctgtcaatagacatccaacatcgacattcgacgtcaattgtctataaatcaacgtataaattttagaaataacattagcgaattgttgtgcattgatgtcgttattctgaaacagtatgattttaggtagcattttcttaacaaagagaacgtatttattgttactcagttgaacagatgatatatccagattactaacgcatctgattccgtataccaaactttcagaagaaatggtatacaattgtttgtattcattcaatgtctctttttcagaaattagtttagagtcgaatactgcaataattttcaagagatagttttcatcagataagattttatttagtgtagatatgataaaactattgttttgttggagaacttgatacgccgcgttctctgtagtcgacgctctcaaatgggaaacgatctccattatttttttggaatcggatactatatcttcggtatcttgacgcagtctagtatacatagagttaagagagattagagtttgtacattaagcaacatgtctctaaatgtggctacaaacttttccttttccacatcatctagtttattatataccgatttcacaacggcaccagatttaaggaaccagaatgaaaaactctgataactacaatatttcatcatagttacgattttatcatcttctatagttggtgtaatagcgcatacctttttctccaagactggaaccaacgtcataaaaatgtttaaatcaaaatccatatcaacatctgatgcgctaagaccagtctcgcgttcaagattatctttactaatggtgacgaactcatcgtatagaactctaagtttgtccattatttatttacagatttagttgtttaatttatttgtgctcttccagagttgggatagtatttttctaacgtcggtattatattattaggatctacgttcatatgtatcataatattaatcatccacgttttgataaatctatctttagcttctgaaataacgtatttaaacaaaggagaaaaatatttagctacggcatcagacgcaataacattttttgtaaatgtaacgtatttagacgacagatcttcgttaaaaagttttccatctatgtagaatccatcagttgttaacaccattcccgcgtcagattgaataggagtttgaatagtttgttttggaaatagatccttcaataacttatagttgggtgggaaaaaatcgattttatcactagactctttcttttttactatcattacctcatgaactatttcttgaatgagtatatgtattttctttcctatatcggacgcgttcattggaaaatataccatgtcgttaactataagaatatttttatcctcgtttacaaactgaataatatcagatgtagttcgtaaacgaactatatcatcaccagcacaacatctaactatatgatatccactagtttcctttagtcgtttattatcttgttccatattagcagtcattccatcatttaagaaggcgtcaaagataatagggagaaatgacattttggattctgttacaactttaccaaaattaaggatatacggacttactatctttttctcaacgtcaatttgatgaacacacgatgaaaatgtacttcgatgagattgatcatgtagaaaacaacaagggatacaatatttccgcatatcatgaaatatattaagaaatcccaccttattatatttccccaaaggatccatgcacgtaaacattatgccgttatcattaataaagacttctttctcatcggatctgtaaaagttgttactgatttttttcattccaggatctagataattaataatgatgggttttctattcttattctttgtattttggcatatcctagaccagtaaacagtttccactttggtaaaatcagcagacttttgaacgctattaaacatggcattaatggcaataactaaaaatgtaaaatatttttctatgttaggaatatggtttttcactttaatagatatatggtttttggccaaaatgatagatatttttttatccgaggatagtaaaatattattagtcgccgtctctataaaaatgaagctagtctcgatatccaattttattctagaattgataggagtcgccaaatgtaccttatacgttatatctcccttgatgcgttccatttgtgtatctatatcggacacaagatctgtaaatagttttacgttattaatcatcacggtatcgccgtcgctagataatgctaatgtaccatccaagtcccaaatggagagatttaactgttcatcgtttagaataaaatgattaccggtcatattaataaagtgttcatcgtatctagataacaacgacttataattaatgtccaagtcttgaactcgctgaatgatcttttttaacccagttagttttagattggtacgaaatatattgttaaactttgattctacagtaatgtccaaatctagttgtggaaatacttccatcaacattgtttcaaacttgataatattattatctacatcttcatacgatccaaattccggaatagatgtatcacatgctcttgccacccagataaccaaaaagtcacacgctccaggatatacattgtataaaaagctatcgtttttaagtagggtttttttctgcgtgtatacgaagggattaaaaatagtattatcaacgtaactatattccaaattattcttatgagaatagataataatatcgtccttaatatctaacaaatttcctaaatatccctttaattgagtcattcgaagcgtcaatagaatatgtctcttaactatttccggctgttgtatatttaaatgacttcgtaaaaaataatatatgggcgacttctcatctatgtaatcatatggagtgagatatagggctcgttctacctcctgccccttacccacctgtaataccaattgcggacttactatatatcgcatatttatatcgtggggtaaagtgaaaatctactaccgatgatgtaagtcttacaatgttcgaaccagtaccagatcttaatttggaggcctccgtagaactaggggaggtaaatatagatcaaacaacacctatgataaaggaaaatagcggttttatatcccgtagtagacgtctattcgcccatagatctaaggatgatgagagaaaactagcactacgattctttttacaaagactttattttttagatcatagagagattcattatttgttcagatgcgttgacgctgtaaaagacgtcactattaccaaaaaaaataacattatcgtggcgccttatatagcacttttaactatcgcatcaaaaggatgcaaacttacagaaacaatgattgaagcattctttccagaactatataatgaacatagtaagaaatttaaattcaactctcaagtatccatcatccaagaaaaactcggataccagtttggaaactatcacgtttatgattttgaaccgtattactctacagtagctctggctattcgagatgaacattcatctggcatttttaatatccgtcaagagagttatctggtaagttcattatctgaaataacatatagattttatctaattaatctaaaatctgatcttgttcaatggagtgctagtacgggcgctgtaattaatcaaatggtaaatactgtattgattacagtgtatgaaaagttacaactggtcatagaaaatgattcacaatttacatgttcattggctgtggaatcagaacttccaataaaattacttaaagatagaaatgaattatttacaaaattcatcaacgagttaaaaaagaccagttcattcaagataagcaaacgcgataaggatacgctactaaaatattttacttaggactggagttagaatttatagacgactcatttcgtttatcattattactaccatcattattagtattcttcttgttatcttgttcagaaatatacagcaatgctatgcctaatactaaatacattatcatgcttgcaatggctctaacaacgacgaaccaaaatgaatttggtcgtagcttttgttcacaaaaatacataaagaaatgtctacataaatctatggcgccattggctacttgaaatagcgccagtcctcctacagattttaatatagctgtataacatgacatttattcatcatcaaaagagacagagtcaccatctgtcatatttagattttttttcatgtgttcaaagtatcctctactcatttcattataatagtttatcatacttagaattttaggacggatcaatgagtaagacttgactagatcgtcagtagtaatttgtgcatcgtctattctgcatccgcttcgtcgaataatgtatagcatcgctttgagattctccatagctatcaagtctttatacaatgacatggaaatatctgtgaatactttatacttctccaacatcgatgccttaacatcatcgcctactttagcattgaaaatacgttctattgtgtagatggatgtagcaagatttttaaacaacaatgccatcttacacgatgattgcctcaagtctccaatcgtttgtttagaacgattagctacagagttcaacgcttggctgactagcatattattatctttagaaattgtattcttcaatgaagcgtttatcatatctgtgatttcgttagtcatattacagtctgactgggttgtaatgttatccaacatatcacctatggatacggtacacgtaccagcatttgtaataatcctatctaagatgttgtatggcattgcgcagaaaatatcttctcctgtaatatctccactctcgataaatctactcagattattcttaaatgccttattctctggagaaaagatatcagtgtccatcatttcattaatagtatacgcagaaaagataccacgagtatcaattctatccaagatacttatcggttccgagtcacagataatggtttcctctccttcgggagatcctgcatagaaatatctaggacaatagtttctatactgtctgtaactctgataatctctaaagtcactaactgataccatgaaattgagaagatcaaacgctgaagtaatcaatttttctgcctcgtttttactacaactagttttcatcaatgtagtgacgatgtattgtttagttactcttggtctaatactgatgatagagatattattacttcccataatggatcttctagtagtcaccttaaagcccattgatgcaaatagcagatagataaagtcttggtatgactcctttctaatatagtacggactacctttgtcacccaactttatacccacataagccataacaacctctttaatagccgtttcatgaggtttatcagccatgagcctgagtagttggaagaatctcatgaatcccgtctcagaaagtcctatatgcatgatagatttatctttcctgggaaactctcgtatagtcatagatgaaatactcttcaaagtttctgaaataagattagtaacagtcttacctccgactactctgggtaacaaacatactctaataggtgttttctctgcggagataatatcagaaaggatagagcaataagtagtattattgtgattataaagaccgaatacataacaggtagaatttataaacatcatgtcctgaaggtttttagacttgtattcctcgtaatccataccgtcccaaaacatggatttggtaactttgatagccgtagatctttgttccttcgccaacaggttaaagaaattaataaagaatttgttgtttctatttatgtccacaaattgcacgtttggaagcgtaactgttacgttcactgcagcattttgaggatcgcgagtatgaagtacgatgttattgtttactggtatatctggaaagaaatctaccagtctaggaataagagattgatatcgcatagaaatagtaaagtttataatctcatcatcgaagagcattttgttaccattgtaataaatatccactctgtcatatgtataaatgaagtactgttcaaacatgatgagatgtttatatgttggcatagtagtgagatcgacgtttggtaatggcaatgtattaagattaactccataatgtctagcagcatctgcgatgttataagtgtcgtcaaagcggggtcgatcttgtgctgttatatattgtctaacacctataagattatcaaaatcttgtctgcttaatacaccgttaacaatttttgccttgaattcttttattggtgcattaataacatccttatagaggatgttaaacaaataagtgttatcaaagttaagatctggatatttcttttctgctagaacatccattgagtcggagccatctggtttaatataaccaccgataaatctagctctgtattctgtatccgtcaatctaatattaagaaggtgttgagtgaaaggtggaagatcgtaaaagctgtgagtattaatgataggattagtttccgaactaatgttaattggggtattaataatatctatatttccagcgttaagtgtaacattaaacagttttaattcacgtgacgtggtatcaattaaataattaatgcccaatttggatatagcagcctgaagctcatcttgtttagttacggatcctaatgagttattaagcaatatatcgaacggatgaacgaaggttgttttaagttggtcacatactttgtaatctagacatagatgcggaagaacggtagaaactatacgaaataaatattcagagtcctctaattgatcaagagtaactattgacttaataggcatcatttatttagtattaaatgacgaccgtaccagtgacggatatacaaaacgatttaattacagagttttcagaagataattatccatctaacaaaaattatgaaataactcttcgtcaaatgtctattctaactcacgttaacaacgtggtagatagagaacataatgccgccgtagtgtcatctccagaggaaatatcctcacaacttaatgaagatctatttccagatgatgattcaccggccactattatcgaacgagtacaacctcatactactattattgacgatactccacctcctacttttcgtagagagttattaatatcggaacaacgtcaacaacgagaaaaaagatttaatattacagtatcgaaaaatgctgaagcaataatggaatctagatctatgataacttctatgccaacacaaacaccatccttgggagtagtttatgataaagataaaagaattcagatgttagaggatgaagtggttaatcttagaaatcaacgatctaatacaaaatcatctgataatttagataattttaccaaaatactatttggtaagactccgtataaatcaacagaagttaataagcgtatagccatcgttaattatgcaaatttgaacgggtcccccttatcagttgaggacttggatgtttgttcggaggatgaaatagatagaatctataaaacgattaaacaatatcacgaaagtagaaaacgaaaaattatcgtcactaacgtgattattattgtcataaacattatcgagcaggcattgctaaaactcggatttgaagaaatcaaaggactgagtaccgatatcacttcagaaattatcgatgtggagatcggagatgactgcgatgctgtagcatctaaactaggaatcggtaacagtccggttcttaatattgtattgtttatactcaagatattcgttaaacgaattaaaattatttaatttaatacattcccatatccagacaacaatcgtctggattaatctgttcctgtcgtctcataccggacgacatattaatctttttattagtaggcatctttttagatggtttctttttcccagcattaactgagtcgatacctagaagatcgtgattgatctctccgaccattccacgaacttctaattggccgtctctgacggtaccataaactattttaccagcattagtaacagcttggacaatctgaccatccattgcgttgaatgatgtagttgctgttgttctacgtttaggagcaccagaagtatttttggagcccttggaggctgatgtagaagaagacgaggattttgatttacatgtaatacattttgtactctttgattttgtatcacatgcgccggcagtcacatttgtttgagaattaagattattgttgcctcctttgacggctgcatctccaccgatttgcgctagtagatttttaagctgtggtgtaatcttattaactgtttcgatataatcatcgtaactgcttctaacggctaaattttttttatccgccatttagaagctaaaaatatttttatttatgcagaagatttaactagattatacaatgaactaatatgatccttttccagattatttacaaacttggtattttttggttctggaggaggcgaatttaaattcggacttggattcggattttgtgagttcttgatcttattatacatcgagtataggatggcgacggtaactgctacgcaaataccgatcaacaaaagaataccaatcatttattgacaataacttcactattgatcaagtatgcaatatatcatcttttcactaaataagtagtaataatgattcaacaatgtcgagatatatggacgataataatttagttcatggaaatatcgctatgattggtatgaatgactccgctaactctgtggggtgcgcagtgctttccccacatagaataaattagcattccgactgtgataataataccaagtataaacgccataatactcaatactttccatgtacgagtgggactggtagacttactaaagtcaataaaggcgaagatacacgaaagaatcaaaagaatgattccagcgattagcacgccggaaaaataatttccaatcataagcatcatgtccatttaactaataaaaattttaaatcgccgaatgaacaaagtggaatataaaccatataaaaacaatagtttgtactgcaaaaataatatctatttttgttttcgaagatatggtaaaattaaatagtagtacacagcatgttataactaacagcagcaacggctcgtaattacttatcatttactagacgaaaaggtggtgggatattttcttgctcaaataatacgaatatatcacccatccattttatgcgatgtttatatactctaatctttaatagatctatagacgacgggtttaccaacaatatagattttatcgattcatctaatttaaacccttccttaaacgtgaatgatctattatctggcataacgatgactctacctgatgaatcggacaatgtactgggccatgtagaataaattatcaacgaattatcgtctacgaacatttatatcatttgttttaattttaggacgcgaataaatggatataaaatagaaaataacagatattacaaccaatgttatggccgcgcccaaccaggtaggcagttttattttatcttttactacaggttctcctggatgtacgtcaccaacggcggacgtagttctagtacaattagacgtaagttctgcttgggaattttttaacgctaaagagttaacgttaatcgtgcacccaacgtatttacatctagttctttgaacatcttgattataatataaccattttctatctctagattcgtcggtgcactcatgtaaccaacataccctaggtcctaaatatttatctccggaattagattttggataattcgcgcaccaacaatttctatttcctttatgatcgttacaaaagacgtataatgccgtatccccaaaagtaaaataatcaggacgaataattctaataaactcagaacaatatctcgcatccatatgtttggagcaaatatcggaataagtagacatagccggtttccgttttgcacgtaaccattctaaacaattggggtttccaggatcgtttctacaaaatccagtcatgaaatcatcacaatgttctgtcttgtaattattattaaatatttttggacagtgtttggtatttgtcttagaacaacattttgccacgctatcactatcgcccaggagataatccttttttataaaatgacatcgttgcccggatgctatataatcagtggcgtgttttaaatccttaatatattcaggagttacctcgttctgataatagattaatgatccaggacgaaatttgaaagaactacatggttctccatgaattaatacatattgtttagcaaattcaggaactataaaactactacaatgatctatcgacataccatctatcaaacaaaacttgggtttaatttctcccggagatgtttcataatagtacgtataactttcttctgcaaacttaacagctctattatattcaggataattaaaacctaattccatatatttgtctcgtatatctgctattcctggtgctattttaattctattaagagtaacggctgcccccattcttaataatcgtcagtatttaaactgttaaatgttggtatatcaacatctaccttatttcccgcagtataaggtttgttgcaggtatactgttcaggaatggttacatttatacttcttctatagtcctgtctttcgatgttcatcacatatgcaaagaacagaataaacaaaataatgtaagaaataatattaaatatctgtgaattcgtaaatacattgattgccataataattacagcagctacaatacatacaatagacattcccacagtgttgccattacctccacgatacatttgagttactaagcaataggtaataactaagctagtaagaggcaatagaaaagatgagataaatatcatcaatatagagattagaggagggctatatagagccaagacgaacaaaatcaaaccgagtaacgttctaacatcattatttttgaagattcccaaataatcattcattcctccataatcgttttgcattatacctccatctttaggcataaacgattgctgctgttcctctgtaaataaatctttatcaagcactccagcacccgcagagaagtcgtcaagcatattgtaatatcttaaataactcatttatatattaaaaaatgtcactattaaagatggagtataatctttatgccgaactaaaaaaaatgacttgtggtcaacccctaagtctttttaacgaagacggggatttcgtagaagttgaaccgggatcatcctttaagtttctgatacctaagggattttacgcctctccttccgtaaagacgagtctagtattcgagacattaacaacgaccgataataaaatcactagtatcaatccaacaaatgcgccaaagttatatcctcttcaacgcaaagtcgtatctgaagtagtttctaatatgaggaaaatgatcgaatcaaaacgtcctctatacattactcttcacttggcgtgtggatttggtaagactattaccacgtgttatcttatggctacacacggtagaaaaaccgtcatttgcgtacccaataaaatgttaatacatcaatggaagacacaggtagaggcagtcggattggaacataagatatctatagatggagtaagtagtctattaaaggaactaaagactcaaagtccggatgtattaatagtagtcagtagacatctgacaaacgatgccttttgtaaatatatcaataagcattatgatttgttcatcttggatgaatcacatacgtataatctgatgaacaatacagcagttacaagatttttagcgtattatcctccgatgatgtgttattttttaactgctacacctagaccagctaaccgaatttattgtaacagtattattaatattgccaagttatccgatctaaaaaaaactatctatgcggtagatagtttttttgagccatattccacagacaatattagacatatggtaaaacgactagatggaccatctaataaatatcatatatatactgagaagttattatctgtagacgagcctagaaatcaacttattcttgataccctggtagaagaattcaagtcaggaactattaatcgaattttagttattactaaactacgtgaacatatggtattcttctacaaacgattattagattttttcggatcagaggttgtatttataggagacgcccaaaatagacgtactccagatatggtcaaatcaatcaaggaactaaatagatttatattcgtatccaccttattttattccggtactggtttagatattcctagtttggattcgttgttcatttgctcggcagtaatcaacaatatgcaaatagagcaattactagggagggtatgtcgagaaacagaactattagataggacggtatatgtatttcctaacacatccatcaaagaaataaagtacatgataggaaatttcatgcaacgaattattagtctgtctgtagataaactaggatttaaacaaaaaagttatcggaaacatcaagaatccgatcccacttctgtatgtacaacatcctccagagaagaacgtgtattaaatagaatatttaactcgcaaaatcgttaagaagtttaagcgacgatccgcatgctgcgcaggccagtgtattacccctcatagtattaatataatccaatgatacttttgtgatgtcggaaatcttaaccaatttagactgacaggcagaacacgtcatgcaatcatcatcgtcatcgataactgtagtcttgggcttctttttgcggctcttcattccggaacgcacattggtgctatccatttaggtagtaaaaaataagtcagaatatgccctatagcacgatcgtgcaaaacctggtatatcgtctctatctttatcacaatatagtgtatcgacatttttattattattgacctcgtttatcttggaacatggaatgggaacatttttgttatcaacggccatctttgccttaattccagatgttgtaaaattataactaaacagtctatcatcgacacaaatgaaattcttgtttagacgtttgtagtttacgtatgcggctcgttcgcgtctcattttttcagatattgcaggtactataatattaaaaataagaatgaaataacataggattaaaaataaagttatcatgacttctagcgctgatttaactaacttaaaagaattacttagtctgtacaaaagtttgaaattttcagattctgcggctatagaaaagtataattctttggtagaatggggaacatctacttactggaaaataggcgtgcaaaaggtagctaatgtcgagacgtcaatatctgattattatgatgaggtaaaaaataaaccgtttaatattgatccgggatattacattttcttaccggtatattttggaagcgtctttatttattcgaagggtaaaaatatggtagaacttggatctggaaactcttttcaaataccagatgatatgcgaagtgcgtgtaacaaagtattagacagcgataacggaatagactttctgagatttgttttgttaaacaatagatggataatggaagatgctatatcaaaatatcagtctccagttaatatatttaaactagctagtgagtacggattaaacatacccaaatatttagaaattgaaatagaggaagacacattatttgacgacgagttatactctattatagaacgctctttcgatgataaatttccaaaaatatccatatcgtatattaagttgggagaacttagacggcaagttgtagactttttcaaattctcgttcatgtatattgagtccatcaaggtagatcgtataggagataatatttttattcctagcgttataacaaaatcaggaaaaaagatattagtaaaagatgtagaccatttaatacgatccaaggttagagaacatacatttgtaaaagtaaaaaagaaaaacacattttccattttatacgactatgatggaaacggaacagaaactagaggagaagtaataaaacgaattatagacactataggacgagactattatgttaacggaaagtatttctctaaggttggtagtgcaggcttaaagcaattgactaataaattagatattaatgagtgcgcaactgtcgatgagttagttgatgagattaataaatccggaactgtaaaacgaaaaataaaaaaccaatcagcatttgatttaagcagagaatgtttgggatatccagaagcggattttataacgttagttaataacatgcggttcaaaatagaaaattgtaaggttgtaaatttcaatattgaaaatactaattgtttaaataacccgagtattgaaactatatatggaaactttaaccagttcgtctcaatctttaatatcgtcaccgatgtcaaaaaaagattattcgagtgaaataatatgcgcctttgatataggtgcaaaaaatcctgccagaactgttttagaagtcaaggataactccgttagggtattggatatatcaaaattagactggagttctgattgggaaaggcgcatagctaaagatttgtcacaatatgaatacactacagttcttctagaacgtcagcctagaaggtcgccgtacgtcaaatttatctattttattaaaggctttttatatcatacatcggctgccaaagttatttgcgtctcgcctgtcatgtctggtaattcatatagagatcgaaaaaagagatcggtcgaagcatttcttgattggatggacacattcggattgcgagactccgttccggatagacgcaaattagacgatgtagcggatagtttcaatttggctatgagatacgtattagataaatggaatactaattatacaccttataataggtgtaaatctagaaattacataaaaaaaatgtaataacgttagtaacgccattatggataatctatttacctttctacatgaaatagaagatagatatgccagaactatttttaactttcatctaataagttgcgatgaaataggagatatatatggtcttatgaaagaacgcatttcctcagaggatatgtttgataatatagtgtataataaagatatacatcatgccattaagaaactagtgtattgcgacatccaacttactaaacacattattaatcagaatacgtatccggtatttaacgattcttcacaagtgaaatgttgtcattatttcgacataaactcagataatagcaatattagctctcgtacagtagagatatttgagagggaaaagtcatctcttgtatcatatattaaaactaccaataagaagagaaaggtcaattacggcgaaataaagaaaactgttcatggaggcactaatgcaaattacttttccggtaaaaagtctgacgagtatctgagtactacagttagatccaacattaatcaaccttggatcaaaaccatctctaagaggatgagagttgatatcattaatcactctatagtaacgcgtggaaaaagctctatattacaaactatagaaattatttttactaatagaacatgtgtgaaaatattcaaggattctactatgcacattattctatccaaggacaaggatgaaaaggggtgtatacacatgattgacaaattattctatgtctattataatttatttctgttgttcgaggatatcatccaaaacgagtactttaaagaagtagctaatgttgtaaaccacgtacttacggctacggcattagatgagaaattattcctaattaagaaaatggctgaacacgatgtttatggagttagcaatttcaaaatagggatgtttaacctgacatttattaagtcgttggatcataccgttttcccctctctgttagatgaggatagcaaaataaagttttttaaggggaaaaagctcaatattgtagcattacgatctctggaggattgtataaattacgtgactaaatccgagaatatgatagaaatgatgaaggaaagatcgactattttaaatagcatagatatagaaacggaatcggtagatcgtctaaaagaattgcttctaaaatgaaaaaaaacactgattcagaaatggatcaacgactcggatataagtttttggtgcctgatcctaaagccggagttttttatagaccgttacatttccaatatgtatcgtattctaattttatattgcatcgattgcatgaaatcttgaccgtcaagcggccactcttatcgtttaagaataatacagaacgaattatgatagaaattagcaatgttaaagtgactcctccagattactcacctataatcgcgagtattaaaggtaagagttatgacgcattagccacgttcactgtaaatatctttaaagaggtaatgaccaaagagggtatatccatcactaaaataagtagttatgagggaaaagattctcatttgataaaaattccgctactaataggatacgggaataaaaatccacttgatacagccaagtatcttgttcctaatgtcataggtggagtctttatcaataaacaatctgtcgaaaaagtaggaattaatctagtagaaaagattacaacatggccaaaatttagggttgttaagccaaactcattcactttctcgttttcctccgtatcccctcctaatgtattaccgacaagatatcgccattacaagatatctctggatatatcacaattggaagcgtcgaatatatcatcgacaaagacatttataacggtcaatattgttttgctgtctcaatatttatctagagtgagtctagaattcattagacgtagcttatcatacgatatgcctccagaagttgtctatctagtaaacgcgataatagatagtgctaaacgaattactgaatctattactgactttaatattgatacatacattaatgacctggtggaagctgaacacattaaacaaaaatctcagttaacgatcaacgagttcaaatatgaaatgctgcataactttttacctcatatgaactatacacccgatcaactaaagggattttatatgatatctttactaagaaagtttctctactgtatctaccacacttctagatatccagatagagattcgatggtttgtcatcgtatactaacatacggcaaatattttgagacgttggcacatgatgaattagagaattacataggcaacatccgaaacgatatcatgaacaatcacaagaacagaggcacttacgcggtaaacattcatgtactaacaactcctggacttaatcatgcattttctagtctattgagtggaaagttcaaaaagtcagacggtagttatcgaacacatcctcactattcatggatgcagaatatttctattcctaggagtgttggattttatccggatcaagtaaagatttcaaagatgttttctgtcagaaaataccatccaagtcaatatctttacttttgttcatcagacgttccggaaagaggtcctcaggtaggtttagtatctcaattgtctgtcttgagttccattacaaatatactaacgtctgagtatttggatttggaaaagaaaatttgtgagtatatcagatcatattataaagatgatataagttactttgaaacaggatttccaatcactatagaaaatgctctagtcgcatctcttaatccaaatatgatatgtgattttgtaactgactttagacgtagaaaacggatgggattcttcggtaacttggaggtaggtattactttagttagggatcacatgaatgaaattcgcattaatattggagcgggaagattagtcagaccattcttggttgtggataacggagagctcatgatggatgtgtgtccggagttagaaagcagattagacgacatgacattctctgacattcagaaagagtttccgcatgtcatcgaaatggtagatatagaacaatttacttttagtaacgtatgtgaatcggttcaaaaatttagaatgatgtcaaaggatgaaagaaagcaatacgatttatgtgactttcctgccgaatttagagatggatatgtggcatcttcattagtgggaatcaatcacaattctggacccagagctattcttggatgtgctcaagctaaacaagctatctcttgtctgagctcggatatacgaaataaaatagacaatggaattcatttgatgtatccagagaggccaatcgtgattagtaaggctttagaaacttcaaagattgcggctaattgcttcggccaacatgttactatagcattaatgtcgtacaaaggtatcaatcaagaggatggaattatcatcaaaaaacaatttattcagagaggcggtctcgatattgttacagccaagaaacatcaagtagaaattccattggaaaactttaataacaaagaaagagataggtctaacgcctattcaaaattagaaagtaatggattagttagactgaatgctttcttggaatccggagacgctatggcacgaaatatctcatcaagaactcttgaagatgattttgctagagataatcagattagcttcgatgtttccgagaaatataccgatatgtacaaatctcgcgttgaacgagtacaagtagaacttactgacaaagttaaggtacgagtattaaccatgaaagaaagaagacccattctaggagacaaatttaccactagaacgagtcaaaagggaacagtcgcgtatgtcgcggatgaaacggaacttccatacgacgaaaatggtatcacaccagatgtcattattaattctacatccatcttctctagaaaaactatatctatgttgatagaggttattttaacagccgcatattctgctaagccgtacaacaataagggagaaaaccgacctgtctgttttcctagtagtaacgaaacatccatcgatacatatatgcaattcgctaaacaatgttatgagcattcaaatccgaaattgtctgatgaagaattatcggataaaatcttttgtgaaaagattctctatgatcctgaaacggataagccttatgcatccaaagtattttttggaccaatttattacttgcgtctgagacatttaactcaggacaaggcaaccgttagatgtagaggtaaaaagacgaagctcattagacaggcgaatgagggacgaaaacgtggaggaggtatcaagttcggagaaatggagagagactgtttaatagcgcatggtgcagccaatactattacagaagttttgaaagattcggaagaagattatcaagatgtgtatgtttgtgaaaattgtggagacatagcagcacaaatcaagggtattaatacatgtcttagatgttcaaaacttaatctctctcctctcttaacaaaaattgataccacacacgtatctaaagtatttcttactcaaatgaacgccagaggcgtaaaagtcaaattagatttcgaacgaagacctccttcgttttataaaccattagataaagttgatctcaaaccgtcttttctggtctaatattgtttagtagatacttatcaacatcatcaagattatcaagattatcaagattatcaagataagctaattcactaaacacattatcgatttcggtatcgttactcgcagaataaagttcgttatgatcctgatattcggaaatctgtggagtttcaggttttggtggatgtgtaacagctacttgagataccgaagtctgatattcagaaagctgtggatgttctggttcggcatccaccgatggtgttacaccactactaattggttcagtaacgtctgtggacgatggaggcaccacttctacaggttctggttctttatcctcagtcatcaacggagctacttcaatgcgaggaaatgtataatttggtaatggtttctcatgtggatctgaagaagaggtaagatatctactagaaagataccgatcacgttctagttctcttttgtagaacttaactttttctttctcagcatctagttgatattccaacctcttcacgttactacgttcagatttcaattcacgttcgcatgggttacctccgcagtttttacgagcgatttcacgttcagccttcatgcgtctctccctctctctatcgagtttatcagagcagtctttctgaaggcgatcgaactccataaatttctccaacgctttgattgtttccatagatttccgaagttcagcttttaggactgtgattctttttctttcgaattcacagctggatgtacaaccgtttccattaccgccatctctaagtttcttttctagatcggcaacatttcatccccatgccttttacattcctcgagtctactgtcgtcgaaatatcgttccagctccttttcgacatcaataactttagcacgttgtctctcaagctctcttttgtagttatctgattccctggcacgtttaagatcttcatgcaattgagtcagctcttaacacaatctcttgcttcttcgtcatagtacgcgcaatcactgtgagatccattgttaccacgtctacactcggcgagctcgcgtttaagagattcaatttcccgtttgtattggtccatgtttccattgctaccaccattagatttacaggctgctagttgtcgttcgagatcagaaatacgggttttcttggaattgatttcgtcgatgtacttggcatcgaaacacttattaagttctttttccaattctacgattttatttctttcgcgagtcaattccctcctgtagtaactatctgttttgtcagattcacgctctctacgtagactttcttgcaagttactaatttgttccctagcacgtccgagtttagttttatatgctgaatagagttctgattcatcctttgagcagatctctagcgatcgtttaagattcctgattctagtctttagcctatttacctcctcagaagatgttccgttaccgttgcgtttacactcgttaagctgtctatcaagatccatgattctatctctaagacgttgcatctctctttccatatcagcattgctttcattattacgtctgcagtcactcaactgtctttcaatatctgagattctatctctaagacgtcgcatctctctctgtttcggcattggtttcattattacgtctacagtcgttcaactgtctttcaagatctgatattctagattggagtctgctaatctctgtagcattttcacggcattcactcagttgtctttcaagatctgaaattttagattggagtctgctaatctctgtaagatttcctcctccgctctcgatgcagtcggtcaacttattctctagttctctaatacgcgaacgcagtgcatcaacttcttgcgtgtcttcctggttgcgtgtacattcatcgagtctagattcgagatctctaacgcgtcgtcgttcttcctcaagttctctgcgtactacagaaagcgtgtccctatcttgttgatatttagcaatttctgattctagagtactgattttgcttacgtagttactaatatttgtcttggccttatcaagatcctccttgtatttgtcgcattccttgatatccctacgaagtctggacagttcccattcgacattacgacgtttatcgatttcagctcggagatcgtcatcgcgttgttttagccacatacgactgagttcaagttctcgttgacaagatccatctacttttccattcctaatagtatccagttccttttctagttctgaacgcatttctcgttccctatcaagcgattctctcaattctcggatagtcttcttatcaatttctaataaatctgaaccatcatctgtcccattttgaatatccctgtgttctttgatctcttttgtaagtcggtcgattctttcggttttataaacagaatccctttccaaagtcctaatcttactgagtttatcactaagttctgcattcaattcggtgagttttctcttggcttcttccaactctgttttaaactctccactatttccgcattcttcctcgcatttatctaaccattcaattagtttattaataactagttggtaatcagcgattcctatagccgttcttgtaattgtgggaacataattaggatcttctaatggattgtatggcttgatagcatcatctttatcattattagggggatggacaaccttaattggttggtcctcatctcctccagtagcgtgtggttcttcaatagccgtgttagtaataggcttaggcaaatgcttgtcgtacgcgggcacttcctcatccatcaagtatttataatcgggttctacgtctgaatattcttttctaagagacgcaacttctggagttagtagaagaactctgtttctatatctatcaacgctggaatcaatactcaagttaaggatagcgaatacctcatcgtcatcatccgtatcctctgaaacgccatcatatgacatttcatgaagtctaacgtattgataaacagaatcagatttagtattaaacagatccttaacctttttagtaaatgcatatgtatattttagatctccagatttcataatatggtcgcatgccttaaatgtcagtgcttccataatatagtctggaacactaattggtgatgaaaaagataccggaccatatgctacgttgataaataactctgagccactaactagataatgattaatgttaaggaagaggaaatattcagtgtataggtatgtcttggcgtcatatcttgtactaaacacgctaaacagtttgttaatgtgatcaatttccaatagattaattagagcagcaggaataccaacaaacatattaccacatccgtattttctatgaatatcacatatcatgttaaaaaatcttgatagaagagcgaatatctcgtctgacttaatgagtcgtagttcagcagcaacataagtcataactgtaaatagaacatactttcctgtagtgttgattctagactccacatcaacaccattattaaaaatagttttatatacatctttaatctgctctccgttaatcgtcgaacgttctagtatacggaaacactttgatttcttatctgtagttaatgacttagtgatatcacgaagaatattacgaattacatttcttgtttttcttgagagacctgattcagaactcaactcatcgttccatagtttttttacctcagtggcgaaatctttggagtgcttggtacatttttcaataaggttcgtgacctccatttattataaaaaaattttattcaaaacttaactacaatcgggtaattataaaatcgtagatctcccatgtggtggaatactaccatctatcgcatgtggatggacagtaggtaatggccatgggaacagtaatgtttgcatatttatctttcttgccagtattactgcatattgtcccaatgtttcgatgtgatgttctaacctatcaactgccgctgtatcacaacaatagtgtccgatgaaattaagattatgatccaatgtgtttaatatatgattatcaagtcttatacgatccgcgtcttttttgacaggatcaggttcttctacaggaagaagtttcggcctcttatgatattcatgtctgggaaacggtggtctagggtgaggctccggtatcggagtgggttttggattataatcatcatcgtctatgacatcatcttcgacttcgatatttattttgctatcttgatgatgtcctgtatcagttgcattttcagcactcgactgaatattagcgcattcattgtttattattaccatatttctaaacccaaaatgtatatgttgaacatcagtactatcgttgatgagtcttatagcatgaattcgcttatcgttatcgggtttagcttctgtcaccttagcaattccttttttattaaactctacataatcatatccatttctattgtttgttctaatataaacgagtatagcatcattgctaaatttttcaatagtatcgaaaacagaatatcctaaaccatataatatatattcaggaacactcaaactaaatgtccaggattctcctaaatacgtaaactttaatagtgcgaaatcattcaaaaatctaccacttatagatagatagtacataaatgcgtatagtagtctacctatctctttattatgaaaaccggcattacgatcatatatgtcgtgatatacctgtgatccgtttacgttaaaccataaatacatgggtgatcctataaacatgaatttatttctaattctcagagctatagttaattgaccgtgtaatatttgcttacatgcatacttgatacgctcattaataagatttttatcattgctcgttatctcagaatcgtatatataaggagtaccatcgtgattcttaccagatattatacaaaatactatatataaaatatattgaccaacgttagtaatcatataaatgtttaacgttttaaattttgtattcaatgatccattatcatacgctagcatggtcttatgatattcattctttaaaatataatattgtgttagccattgcattggggctcctaatggagattttttattctcatccattttaggataggctttcataaagtccctaataacttcgtgaataatgtttctatgttttctactgatgcatgtatttgcttcgatttttttatcccatgtttcatctatcatagatttaaacgcagtaatgctcgcaacattaacatcttgaaccgttggtacaattccgttccataaatttataatgttcgccatttatataactcattttttgaatatacttttaattaacaaaagagttaagttactcatatggacgccgtccagtctgaacatcaatctttttagccagagatatcatagccgctcttagagtttcagcgtgattttccaacctaaatagaacttcatcgttgcgtttacaacacttttctatttgttcaaactttgttgttacattagtaatctttttttccaaattagttagccgttgtttgagagtttcctcattgtcgtcttcatcggctttaacaattgcttcgcgtttagcctctggctttttagcagcctttgtagaaaaaaattcagttgctggaattgcaagatcgtcatctccggggaaaagagttccgtccatttaaagtacagattttagaaactgacactctgcgttatttatatttggtacaacacatggattataaatattgatgttaataacatcagaaaatgtaaagtctatacattgttgcatcgtgttaaattttctaatggatctagtattattgggtccaacttctgcctgaaatccaaatatggaagcggatacaaaaccgtttcctggataaaccacacatctccacttttgctttacatcagaaattgtgtcattgacatcttgaactctcctatctaatgccggtgttccacctatagattttgaatattcgaatgctgcatgagtagcattaaattccttaatattgccataattttcatatattgagtaaccctggataaaaagtaaacacaccgcagccgtcgctaccacaataaaaaaaattgatagagagttcatttataatctattagaagctgacaaaatttttttacacgcatcagacaatgctttaataaatagttcaacatctacttttgtcatatcgaaccgatggtatgattctaacctagaattacatccgaaaaagttgactatgttcatagtcattaagtcattaacaaacaacattccagactctggattataagacgatactgtttcgtcacaattacctaccttaatcatgtgattatgaatattggctattagagcaccttctaagaaatctataatatctttgaaacacgatttaaaatcaaaccacgaatatacttctacgaagaaagttagtttacccataggagaaataactataaatggagatctaaatacaaaatccggatctatgatagttttaacattattatattctctattaaatacctccacatctaaaaatgttaattttgaaactatgtcttcgtttattaccgtacctgaactaaacgctataagctctattgtttgagaactctttaaacgatattcttgaaatacatgtaacaaagtttcctttaactcggtcggtttatctaccatagttacagaatttgtatccttatctataatataataatcaaaatcgtataaagttatataattatcgcgttcagattgtgatcttttcaaatagactaaaaaccccatttctctagtaagtatcttatgtatatgtttgtaaaatatcttcatggtgggaatatgctctaccgcagttagccattcctcattgacagcggtagatgtattagacaaaactattccaatgtttaacaagggccattttacgagattattaaatccttgtttgataaatgtagccaatgagggttcgagttcaacgacgattgaattctcttcccgcggatgctgcatgatgaacgacgggatgttgttcgattgatttggaattctttttcgactttttgtttatattaaatattttaaaatttatagctgatagcaattcatgtactacggataatgtagacgcgtattgcgcatcgatatctttattattagataaatttatcaataaatgtgagaagtttgcctcgttaaggtcttccatttaaatattatataaacatttgtgtttgtatcttattcgtcttttatggaatagttttttactagtaaagctgcaattacacactttgtccgtaaaacataaatataaacaccagcttttatcaatcgttccaaaaagtcgacggcggacatttttaacatggcatctattttaaatacacttaggtttttggaaaaaacatcattttataattgtaacgattcaataactaaagaaaagattaagattaaacataagggaatgtcatttgtattttataagccaaagcattctaccgttgttaaatacttgtctggaggaggtatatatcatgatgatttggttgtattggggaaggtaacaattaatgatctaaagatgatgctattttacatggatttatcatatcatggagtgacaagtagtggagcaatttacaaattgggatcgtctatcgatagactttctctaaataggactattgttacaaaagttaataattatgatgatacattttttgacgacgatgattgatcgctattgcacaattttgtttttttactttctaatatagcgtttagattctttttcatgtgcgaatattgatttactaaaatatcgatgtttaacttttgttctatgacgtccttatcagcggtatcggtacatatacgtaattcaccttcacaaaatacggagtcttcgataataatagccaatcgattattggatctagcggtctgtatcatattcaacatgtttaatatatcctttcgtttcccctttacaggcatcgatcgtagcatattttccgcgtctgagatggaaatgttaaaactacaaaaatgcgtaatgttagcccgtcctaatattggtacgtgtctataagtttggcatagtagaataatagacgtgtttaaatgccttccaaagtttaagaattctattagagtattgcattttgatagtttatcgcctacatcatcaaaaataagtaaaaagtgtgctgattttttatgattttgtgcgacagcaatacatttttctatgttacttttagttcgtatcagattatattctagagattcctgactactaacgaaattaatatgatttggccaaatgtatccatcataatctggattataaacgggtgtaaacaagaatatatgtttatattttttaactagtgtagaaaacagagatagtaaatagatagtttttccagatccagatcctcccgttaaaaccattctaaacggcatttttaataaattttctcttgaaaattgtttttcttggaaacaattcataattatatttacagttactaaattaatttgataataaatcaaaatatggaaaactaaggtcgttagtagggaggagaacaaagaaggcatatcgtgatataaataacatttattatcatgatgacaccagaaaacgacgaagagcagacatctgtgttctccgctactgtttacggagacaaaattcagggaaagaataaacgcaaacgcgtgattggtctatgtattagaatatctatggttatttcactactatctatgattaccatgtccgcgtttctcatagtgcgcctaaatcaatgcatgtctgctaacgaggctgctattactgacgccgctgttgccgttgctgctgcatcatctactcatagaaaggttgcgtctagcactacgcaatatgatcacaaagaaagctgtaatggtttatattaccagggttcttgttatatattacattcagactaccagttattctcggatgctaaagcaaattgcactgcggaatcatcaacactacccaataaatccgatgtcttgattacctggctcattgattatgttgaggatacatggggatctgatggtaatccaattacaaaaactacatccgattatcaagattctgatatatcacaagaagttagaaagtatttttgtgttaaaacaatgaactaatatttatttttgtacattaataaatgaaatcgcttaatagacaaactgtaagtaggtttaagaagttgtcggtgccggccgctataatgatgatactctcaaccattattagtggcataggaacatttctgcattacaaagaagaactgatgcctagtgcttgcgccaatggatggatacaatacgataaacattgttatctagataccaacattaaaatgtctacagataatgcggtttatcagtgtcgtaaattacgagctagattgcctagacctgatactagacatctgagagtattgtttagtattttttataaagattattgggtaagtttaaaaaagaccaataataaatggttagatattaataatgataaagatatagatattagtaaattaacaaattttaaacaactaaacagtacgacggatgctgaagcgtgttatatatacaagtctggaaaactggttgaaacagtatgtaaaagtactcaatctgtactatgtgttaaaaaattctacaagtgacaacaaaaaatgaattaataataagtcgttaacgtacgccgccatggacgccgcgtttgttattactccaatgggtgttgactataacagatacattgtatgatgatctcgatatctcaatcatggactttataggaccatacattataggtaacataaaaactgtccaaatagatgtacgggatataaaatattccgacatgcaaaaatgctactttagctataagggtaaaatagttcctcaggattctaatgatttggctagattcaacatttatagcatttgtgccgcatacagatcaaaaaataccatcatcatagcatgcgactatgatatcatgttagatatagaagataaacatcagccattttatctattcccatctattgatgtttttaacgctacaatcatagaagcgtataacctgtatacagctggagattatcatctaatcatcaatccttcagataatctgaaaatgaaattgtcgtttaattcttcattctgcatatcagacggcaatggatggatcataattgatgggaaatgcaatagtaattttttatcataaaagttgtaaagtaaataataaaacaataaatattgaactagtagtacgtatattgagcaatcagaaatgatgctggtacctcttatcacggtgaccgtagttgcgggaacaatattagtatgttatatattatatatttgtaggaaaaagatacgtactgtctataatgacaataaaattatcatgacaaaattaaaaaagataaagagttctaattccagcaaatctagtaaatcaactgatagcgaatcagactgggaggatcactgtagtgctatggaacaaaacaatgacgtagataatatttctaggaatgagatattggacgatgatagcttcgctggtagtttaatatgggataacgaatccaatgttatggcgcctagcacagaacacatttacgatagtgttgctggaagcacgctgctaataaataatgatcgtaatgaacagactatttatcagaacactacagtagtaattaatgaaacggagactgttaaagtacttaatgaagataccaaacagaatcctaactattcatccaatcctttcgtaaattataataaaaccagtatttgtagcaagtcaaatccgtttattacagaacttaacaataaatttagtgagaataatccgtttagacgagcacatagcgatgattatcttaataagcaagaacaagatcatgaacacgatgatatagaatcatcggtcgtatcattggtgtgattagtttcctttttataaaattgaagtaatatttagtattattgctgccgtcacgttgtacaaatggagatattccctgtattcggcatttctaaaattagcaattttattgctaataatgactgtagatattatatagatacagaacatcaaaaaattatatctgatgagatcaatagacagatggatgaaacggtacttcttaccaacatcttaagcgtagaagttgtaaatgacaatgagatgtaccatcttattcctcatagattatcgacgattatactctgtattagttctgtcggaggatgtgttatctctatagataatgacgtcaatggcaaaaatattctaacctttcccattgatcatgctgtaatcatatccccactgagtaaatgtgtcgtagttagcaagggccctacaaccatactggttgctaaagcggatatacccagcaaacgattggtaacatcgtttacaaacgacatactgtatgtaaacaatctatcactgattaattatttgccgttgtctgtattcattattagacgagtcaccgactatttggatagacacatatgcgatcagatatttgctaataataagtggtattcccttataaccatcgacgataagcaatatcctattccatcaaattgtataggtatgtcttctgccaagtacataaattctagcatcgagcaagatactttaatacatgtttgtaacctcgagcatccattcgacttagtatacaaaaaaatgcagtcgtacaattctgtacctatcaaggaacaaatattgtacggtagaattgataatataaatatgagcattagtatttctgtggattaatagatttctagtatggggatcattaatcatctctaatctctaaatacctcataaaacgaaaaaaaagctattatcaaatactgtacggaatagattcattctcttctctttttatgaaactctgttgtatatctactgataaaactggaagcaaaaaatctgataaaaagaataagatcaagatcaaggattatatggaacacgattattataaaataacaatagttcctggttcctcttccacgtctactagctcgtggtattatacacatgcctagtaatagtctctttgcgttgatggaaagcagactagaaataacaggctaaaatgttcagacaccataatagttcccaacccagataataacagagtaccatcaacacattcctttaaactcaatcccaaacccaaaaccgttaaaatgtatccggccaattgatagtagataatgaggtgtacagcgcatgataatttacacagtaaccaaaatgaaaatactttagtaattataagaaatatagatggtaacgtcatcatcaacaatccaataatatgccggagagtaaacattgacggataaaacaaaaatgctccgcataactctatcatggcaataacacaaccaaatacttgtaagattcctaaattagtagaaaatacaacggatatcgatgtataagtgatctcgagaaataataagaataaagtaatgcccgtaaagataaacatcaacattgtttggtaatcattaaaccaattagtatgacgttgaactaatttcacagtaaattttattccagtattatccccgcatgtataagtacctggtaagatatctttatattccataatcaatgagacatcactatctgataacgaatgaagtctagcactagtatgccatttacttaatattgtcgtcttggaagttttattataagttaaaatatcatggttatccaatttccatctaatatactttgtcggattatctatagtacacggaataatgatggtatcattacatgctgtatactctatggtctttgtagttgttataacaaccaacgtatagaggtatatcaacgatattctaactcttgacattttttatttatttaaaatgatacctttgttatttattttattctattttgctaacggtattgaatggcataagtttgaaacgagtgaagaaataatttctacttacttattagacgacgtattatacacgggtgttaatggggcggtatacacattttcaaataataaactaaacaaaactggtttaactaataataattatataacaacatctataaaagtagaggatgcggataaggatacattagtatgcggaaccaataacggaaatcccaaatgttggaaaatagacggttcagacgacccaaaacatagaggtagaggatacgctccttatcaaaatagcaaagtaacgataatcagtcacaacggatgtgtactatctgacataaacatatcaaaagaaggaattaaacgatggagaagatttgacggaccatgtggttatgatttattcacggcggataacgtaattccaaaagatggtttacgaggagcattcgtcgataaagacggtacttatgacaaagtttacattcttttcactgatactatcggctcaaagagaattgttaaaattccgtatatagcacaaatgtgcctaaacgacgaaggtggtccatcatcgttgtctagtcatagatggtcgacgtttctcaaagtcgaattagaatgtgatatcgacggaagaagttatagataaattattcattctaaaactataaaaacagataatgatacgatactatatgtattcttcgatagtccgcattatgtacctattctatgaataccattaaacaatctttttctacgtcaaaattggaaggatatacaaagcaattgccgtctccagctcctggtatatgtctaccagctggaaaagttgttccacataccacgtttgaagtcatagaaaaatataatgtactagatgatattataaagcctttatctaaccaacctatcttcgaaggaccgtctggtgttaaatggttcgatataaaggagaaggaaaatgaacatcgggaatatagaatatacttcataaaagaaaattctatatattcgttcgatacaaaatctaaacaaactcgtagctcgcaagtcgatgcgcgactattttcagtaatggtaacttcgaaaccgttatttatagcagatatagggataggagtaggaatgccacaaatgaaaaaaatacttaaaatgtaatcttaatcgagtacaccacacgacaatgaacaaacataagacagattatgctggttatgcttgctgcgtaatatgcggtctaattgttggaattatttttacagcgacactattaaaagttgtagaacgtaaattagttcatacaccatcaatagataaaacgataaaagatgcatatattagagaagattgtcctactgactggataagctataataataaatgtatccatttatctactgatcgaaaaaacctgggaggaaggacgtaatgcatgcaaagctctaaatccaaattcggatctaattaagatagagactccaaacgagttaagttttttaagaagccttagacgaggctattgggtaggagaatccgaaatattaaaccagacaaccccatataattttatagctaaaaatgccacgaagaatggaactaaaaaacggaaatatatttgtagtacaacgaatactcccaaactgcattcgtgttacactatataacaattacactacatttttatcataacactacttcggttagatgttttagaaaaaaataaatatcgccgtaccgttcttgtttttataaaaataacaattaacaattatcaaattttttctttaatattttacgtggttgaccattcttggtggtaaaataatctcttagtgttggaatggaatgctgtttaatgtttccgcactcatcgtatattttgacgtatgcagtcacatcgtttacgcaatagtcagactgtagttctatcatgcttcctacatcagaaggaggaacagttttaaagtctcttggttttaatctattgccattagttttcatgaaatcctttgttttatccacttcacattttaaataaatgtccactatacattcttctgttaattttactagatcgtcatgggtcatagaatttataggttccgtagtccatggatccaaactagcaaacttcgcgtatacggtatcgcgattagtgtatacaccaactgtatgaaaattaagaaaacagtttaataaatcaacagaaatatttaatcctccgtttgatacagatgcgccatatttatggatttcggattcacacgttgtttgtctgaggtgttcgtctagtgttgcttctacgtaaacttcgattcccatatattctttattgtcagaatcgcataccgatttatcatcatacactgtttgaaaactaaatggtatacacatcaaaataataaataataacgagtacattctgcaatattgttatcgtaattggaaaattagtgttcgagtgagtcggattatgtgagtactggattgtatattttattttatattttgtaataagaataaaatgctaatgtcaagtttattccaatagatgtcttattaaaaaacatatataataaataacaatggctgaatggcataaaattatcgaggatatctcaaaaaataataagttcgaggatgccgccatcgttgattacaagactacaaagaatgttctagctgctattcctaacagaacatttgccaagattaatccgggtgaaattattcctctcatcactaatcgtaatattctaaaacctcttattggtcagaaatattgtattgtatatactaactctctaatggatgagaacacgtatgctatggagttgcttactgggtacgcccctgtatctccgatcgttatagcgagaactcataccgcacttatatttttgatgggtaagccaacaacatccagacgtgatgtgtatagaacgtgtagagatcacgctacccgtgtacgcgcaactggtaattaaaataaaaagtaatattcatatgtagtgtcaattttaaatgatgatgatgaaatggataatatccatattgacgatgtcaataatgccggtattggcatacagctcatcgatttttagatttcattcagaggatgtggaattatgttatgggcatttgtattttgataggatctataatgtagtaaatataaaatataatccgcatattccatatagatataattttattaatcgcacgttaaccgtagatgaactagacgataatgtcttttttacacatggttattttttaaaacacaaatatggttcacttaatcctagtttgattgtctcattatcaggaaacttaaaatataatgatatacaatgctcagtaaatgtatcgtgtctcattaaaaatttggcaacgagtacatctactatattaacatctaaacataagacttattctctacatcggtccacgtgtattactataataggatacgattctattatatggtataaagatataaatgacaagtataatgacatctatgattttactgcaatatgtatgctaatagcgtctacattgatagtgaccatatacgtgtttaaaaaaataaaaatgaactcttaattatgctatgctattagaaatggataaaatcaaaattacggttgattcaaaaattggtaatgttgttaccatatcgtataacttggaaaagataactattgatgttacacctaaaaagaaaaaagaaaaggatgtattattagcgcaatcagttgctgtcgaagaggcaaaagatgtcaaggtagaagaaaaaaatattatcgatattgaagatgacgatgatatggatgtagaaagcgcataatacgatctataaaaataagtatataataaatactttttatttacggtactcttgtagtggtgataccctactcaattatttttttaaaaaaatacttattctgattcttctagccatttccgtgttcgttcgaatgccacatcgacgttaaagataggggagtagttgaaatctagttctgcattgttggtacgcacctcaaatgtagtgttggatatcttcaacgtatagttgttgagtagtgatggttttctaaatagaattctcttcatatcattcttgcacgcgtacatttttagcatccatcttggaattctagatccttgttctattcccaatggtttcatcaatagaagattaaacatatcgtacgaacacgatggagagtaatcgtagcaaaagtaagcatttcctttaatcttagatcccggatactggatatattttgcagccaacacgtgcatccatgcagcatttcctacatatacccggctatgcaccgcgtcatcatcgactgtacgatacataatgttaccgtgttgcttacattgctcgtaaaagactttcgtcaatttgtctccttctccgtaaattccagtgggtcttaggcaacaagtatacaattttgctccattcatgattacggaattattggctttcataaccagttgctcggccatacgtttactttttgcgtatacatgtcctggtgatatatcataaagggtatgctcatggccgatgaatggatcaccgtgtttattgggtcctattgcttccatgctactagtatagatcaaatacttgattcctaggtccacacaagctgccaatatagtctgtgttccataatagtttactttcatgatttcattatcggtgtattttccaaatacatccactagagcagccgtatgaataatcagatttaccccatctagcgcttctctcaccttatcaaagtcgtttatatcacattgtatatagtttataaccttaactttcgaggttattggttgtggatcttctacaatatctatgactctgatttcttgaacatcatctgcactaattaacagttttactatatacctgcctagaaatccggcaccaccagtaaccgcgtacacggccattgctgccactcataatatcagactacttattctattttactaaataatggctgtttgtataatagaccacgataatatcagaggagttatttactttgaaccagtccatggaaaagataaagttttaggatcagttattggattaaaatccggaacgtatagtttgataattcatcgttacggagatattagtcaaggatgtgattccataggcagtccagaaatatttatcggtaacatctttgtaaacagatatggtgtagcatatgtttatttagatacagatgtaaatatatttacaattattggaaaggcgttatctatttcaaaaaatgatcagagattagcgtgtggagttattggtatttcttacataaatgaaaagataatacattttcttacaattaacgagaatggcgtttgatatatcagttaatgcgtctaaaacaataaatgcattagtttacttttctactcagcaaaataaattagtcatacgtaatgaagttaatgatacacactacactgtcgaatttgatagggacaaagtagttgacacgtttatttcatataatagacataatgacaccatagagataagaggggtgcttccagaggaaactaatattggttgcgcggttaatacgccggttagtatgacttacttgtataataagtatagttttaaactgattttagcagaatatataagacacagaaatactatatccggcaatatttattcggcattgatgacactagatgatttggctattaaacagtatggagacattgatctattatttaatgagaaacttaaagtagactccgattcgggactatttgactttgtcaactttgtaaaggatatgatatgttgtgattctagaatagtagtagctctatctagtctagtatctaaacattgggaattgacaaataaaaagtataggtgtatggcattagccgaacatatatctgatagtattccaatatctgagctatctagactacgatacaatctatgtaagtatctacgcggacacactgagagcatagaggatgaatttgattattttgaagacgatgattcgtctacatgttctgccgtaaccgacagggaaacggatgtataattttttttatagcgtgaaggatatgataaaaaatataattgttgtatttatcccattccaatcaccttatatgattctgtaaaaaaattatactgtaacacaataaaggagtcttatagatgtatagaggtcagatactggtttgataaactgtttattccacataagtatgtttgactttatggttagacccgcatactttaacaaatcactgaaaattggagttaggtattgacctctcagaatcagttgccgttctggaacattaaatgtattttttatgatatactccaacgcatttatgtgggcatacaacaagtcattactaatggagtattccaagagttttagttgtctagtatttaacaagagaagagatttcaacagactgtttatgaactcgaacgccgcctcattgtcgcttatattgatgatgtcgaattctcccaatatcatcactgatgagtagctcatcttgttatcgggatccaagttttctaaagatgtcattaaaccctcgatcatgaatggatttatcatcatcgtttttatgttggacatgagcttagtccgtttgtccacatctatagacgacgatttctgaattatttcatatatccctctctttaactccaggaacttgtcaggatggtctactttaatatgttctcgtctaagagatgaaaatctttggatggttgcacgcgacttttctttaaaggatgacgttgcccaagatcctctcttaaatgaatccatcttatccttggacaagatggacagtctattttccttagatggtttaatatttttgttacccatgatctataaaggtagacctaatcgtctcggatgaccatatatttattttcagttttattatacgcataaattgtaaaaaatatgttaggtttacaaaaatgtctcgtggggcattaatcgtttttgaaggattggacaaatctggaaaaacaacacaatgtatgaacatcatggaatctataccggcaaacacgataaaatatcttaactttcctcagagatccactgtcactggaaagatgatagatgactatctaactcgtaaaaaaacctataatgatcatatagttaatctattattttgtgcaaatagatgggagtttgcatcttttatacaagaacaactagaacagggaattactttaatagttgatagatacgcattttctggagtagcgtatgccgccgctaaaggcgcgtcaatgactctcagtaagagttatgaatctggattgcctaaacccgacttagttatattcttggaatctggtagcaaagaaattaatagaaacgtcggcgaggaaatttatgaagatgttacattccaacaaaaggtattacaagaatataaaaaaatgattgaagaaggagatattcattggcaaattatttcttctgaattcgaggaagatgtaaagaaggagttgattaagaatatagttatagaggctatacacacggttactggaccagtggggcaactgtggatgtaatagtgaaattacattttttataaatagatgttagtacagtgttataaatggatgaagcatattactctggcaacttggaatcagtactcggatacgtgtccgatatgcataccgaactcgcatcaatatctcaattagttattgccaagatagaaactatagataatgatatattaaacaaggacattgtaaattttatcatgtgtagatcaaacttggataatccatttatctctttcctagatactgtatatactattatagatcaagagatctatcagaccgaattgattaattcattagacgacaatgaaattatcgattgtatagttaacaagtttatgagcttttataaggataacctagaaaatatagtagatgctatcattactctaaaatatataatgaataatccagattttaaaactacgtatgccgaagtactcggttccagaatagccgatatagatattaaacaagtgatacgtaagaatatactacaattgtctaatgatatccgcgaacgatatttgtgaaaaatattaaaaaaaaatactttttttattaaatgacgtcgcttcgcgaatttagaaaattatgctgtgatatatatcacgcatcaggatataaagaaaaatctaaattaattagagactttataacagatagggatgataaatatttgatcattaagctattgcttcccggattagacgatagaatttataacatgaacgataaacaaattataaaattatatagtataatatttaaacaatctcaggaagatatgctacaagatttaggatacggatatataggagacactattaggactttcttcaaagagaacacagaaatccgtccacgagataaaagcattttaactttagaagaagtggatagttttttaactacgttatcatccgtaactaaagaatcgcatcaaataaaattattgactgatgtagcatctgtttgtacatgtaatgatttaaaatgtgtagtcatgcttattgataaagatctaaaaattaaagcgggccctcggtacgtacttaacgctattagtcctcatgcctatgatgtgtttagaaaatctaataacttgaaagagataatagaaaatgcatctaaacaaaatctagactctatatctatttctgttatgactccaattaatcccatgttagcggaatcgtgtgattctgtcaataaggcgtttaaaaaatttccatcaggaatgtttgcggaagtcaaatacgatggtgaaagagtacaagttcataaaaataataacgagtttgccttctttagtagaaacatgaaaccagtactctctcataaagtggattatctcaaagaatacataccgaaagcatttaaaaaagctacgtctatcgtattggattctgaaattgttcttgtagacgaacataatgtaccgctaccgtttggaagtttaggaatacacaaaaagaaagaatataaaaactctaacatgtgtttgttcgtgtttgactgtttgtactttgatggattcgatatgacggacattccattgtacgaacgaagatcttttctcaaagatgttatggttgaaatacccaatagaatagtattctcagagttgacgaatattagtaacgagtctcagttaactgacgtattggatgatgcactaacgagaaaattagaaggattggtcttaaaagatattaatggagtatacgaaccgggaaagagaagatggttaaaaataaagcgagactatttgaacgagggttccatggcagattctgccgatttagtagtactaggtgcctactatggtaaaggagcaaagggtggtatcatggcagtctttctaatgggttgttacgacgatgaatccggtaaatggaagacggttaccaagtgttcaggacacgatgataatacgttaagggagttgcaagaccaattaaagatgattaaaattaacaaggatcccaaaaaaattccagagtggttagtagttaataaaatctatattcccgattttgtagtagaggatccgaaacaatctcagatatgggaaatttcaggagcagagtttacatcttccaagtcccataccgcaaatggaatatccattagatttcctagatttactaggataagagaggataaaacgtggaaagaatctactcatctaaacgatttagtaaacttgactaaatcttaatagttacatacaaactgaaaattaaaataacaccatttagttggtggtcgccatggatggtgttattgtatactgtctaaacgcgttagtaaaacatggcgaggaaataaatcatataaaaaatgatttcatgattaaaccatgttgtgaaagagtttgtgaaaaagtcaagaacgttcacattggcggacaatctaaaaacaatacagtgattgcagatttgccatatatggataatgcggtatccgatgtatgcaattcactgtataaaaagaatgtatcaagaatatccagatttgctaatttgataaagatagatgacgatgacaagactcctactggtgtatataattattttaaacctaaagatgttattcctgttatcatatctataggaaaggataaagatgtctgtgaactattaatctcatcagacatatcgtgtgcatgcgtggagttaaattcatatcacgtagccattcttcccatgaatgtttccttttttaccaaaggaaatgcctcgttgattattctcctgtttgatttctctatcgatgcagcacctctcttaagaagtgtaaccgataataatgttattatatctagacaccagcgtctacatgacgagcttccgagttccaattggttcaagttttacataagtataaagtccgactattgttctatattatatatggttgttgatggatctgtgatgcatgcgatagctgataatagaactcacgcaattattagcaaaaatatattagacaatactacaattaacgatgagtgtagatgctgttattttgaaccacagattaggattcttgatagagatgagatgctcaatggatcatcgtgtgatatgaacagacattgtattatgatgaatttacctgatgtaggcgaatttggatctagtatgttggggaaatatgaacctgacatgattaagattgctctttcggtggctggtaatttaataagaaatcgagactacattcccgggagacgaggctatagctactacgtttacggtatagcctctagataatttttttaagcacgaaataaaaaacataattttaaaccaatctatttcatactattttgtgtgatcaccatggacataaagatagatattagtatttctggtgataaatttacggtgactactaggagggaaaatgaagaaagaaaaaaatatctacctctccaaaaagaaaaaactactgatgttatcaaacctgattatcttgagtacgatgacttgttagatagagatgagatgtttactattctagaggaatattttatgtacagaggtctattaggcctcagaataaaatatggacgactctttaacgaaattaaaaaattcgacaatgatgcggaagaacaattcggtactatagaagaactcaagcagaaacttagattaaattctgaagagggagcagataactttatagattatataaaggtacaaaaacaggatatcgtcaaacttactgtatacgattgcatatctatgataggattgtgtgcatgcgtggtagatgtttggagaaatgagaaactgttttctagatggaaatattgtttacgagcgattaaactgtttattaatgatcacatgcttgataagataaaatctatactgcagaatagactagtatatgtggaaatgtcatagaaagttaatgagagcaaaaatatataaggttgtattccatatttgttattttttctgtaatagttaaaaaaatacattcgatggtctatctatcagattattatgtgttataaggtactttttctcataataaactagagtatgagtaagatagtgtttttcaaaacatataaatctaaaattgatggatgagatatacagctattaatttcgaaaatatataaatctaaaattgatggataagatatacagctattaatttcgaaaatatattttaatctgataactttaaacatggatttttgatggtggtttaacgttttaaaaaaagattttgttattgtagtatatgataatattaaaagatggatataaagaatttgctgactgcatgtactattttttacattactacattggctacggcagatatacctactccgccaccaacgggtcatgtgacaagggagaatatcttgataagaggcataatcaatgttgtaatcggtgtccacctggagaatttgccaaggttagatgtaatggtaacgataacacaaaatgtgaacgctgcccacctcatacatataccacaatccccaattattctaatggatgtcatcaatgtagaaaatgcccaaccggatcatttgataaggtaaagtgtaccggaacacagaacagtaaatgttcgtgtcttcctggttggtattgcgctactgattcttcacagactgaagattgttgaaattgtgtaccaaaaaggagatgtccatgcggatactttggtggaatagatgaacaaggaaatcctatttgtaaatcgtgctgtattggtgaatattgcaactacctacgtaattatagacttgatccattttctccatgcaaactatctaaatgtaattaattatgattttgatgataatgttaccatacattatatcgctacttggttagtgtattattcagtatgaagacctattaataattacttatcttttgacgatcttgttataattataatataaaaacttatggcatagtaactcataattgctgacgcgataaattcgtaataatctgttttgttcaaatttttataaggaatctacaggcataaaaataaaaatataatttataatatactcttacagcgcgccatcatgaatagcagcagtaaattaattgctgttattaatggatttagaaatagtggacgattttgtgatattaatatagttattaatgatgaaaggataaacgctcacagactcatcctatctggagcctccgaatatttttccattctgttttccaataattttatcgattctaatgaatacgaagttaatctaagtcatttagattatcaaagtgttaacgatttgatcgattacatttatgggatacctttgagcctaactaacgataacgtgaaatatattctttcaaccgctgattttttacaaattggatctgccattactgagtgcgaaaaatacatacttaaaaatctttgttctagaaactgtatcgatttctacatatacgctgataaatataataacaagaaaatagaatcagcgtcgtttaacacaatattacgaaatattttgagactcatcaacgatgaaaactttaaatacttaacagaggaatcaatgataaaaattttaagcgatgatatgttaaatataaaaaatgaggattttgcaccactaattctcattaaatggttagagagtactcaacaatcatgcaccgtcgagttacttagatgcctcagaatatcattgctttccccacaagttataaaatcactttatagtcatcaactggttagttcaatctacgaatgtataacattcttaaacaatatagcattcttggatgaatcatttcctagataccatagcatcgagttgatatctatcggtataagtaattcgcatgataagatttccataaactgctacaatcataaaaaaaatacatgggaaatgatatcttcacgtagatataggtgtagtttcgcagtggccgtcctggataatattatctatatgatgggtggatatgatcagtccccgtatagaagttcaaaggttatagcgtacaatacatgtacaaattcttggatatatgatataccagagctaaaatatcctcgttctaattgtgggggactggctgatgacgaatacatttattgtataggcggcatacgcgatcaggattcatcgttgacatctagtattgatagatggaagccatcaaaaccatattggcagaagtatgctaaaatgcgcgaaccaaaatgtgatatgggggttgcgatgttaaacggattaatatatgtcatgggtggaatcgttaaaggtgacacgtgtaccgacgcactagagagtttatcagaagatggatggatgaagcatcaacgtcttccaataaaaatgtccaatatgtcgacgattgttcatgatggcaagatttatatatctggaggttacaacaatagtagtgtagttaatgtaatatcgaatctagtccttagctataatccgatatatgatgaatggaccaaattatcatcattaaacattcctagaattaatcccgctctatggtcagcgcataataaattatatgtaggaggaggaatatctgatgatgttcgaactaatacatctgaaacatacgataaagaaaaagattgttggacattggataatggtcacgtgttaccacgcaattatataatgtataaatgcgaaccgattaaacataaatatccattggaaaaaacacagtacacgaatgattttctaaagtatttggaaagttttataggtagttgatagaacaaaatacataattttgtaaaaataaatcactttttatactaatatgacacgattaccaatacttttgttactaatatcattagtatacgctacaccttttcctcagacatctaaaaaaataggtgatgatgcaactctatcatgtaatcgaaataatacaaatgactacgttgttatgagtgcttggtataaggagcccaattccattattcttttagctgctaaaagcgacgtcttgtattttgataattataccaaggataaaatatcttacgactctccatacgatgatctagttacaactatcacaattaaatcattgactgctagagatgccggtacttatgtatgtgcattctttatgacatcaactacaaatgacactgataaagtagattatgaagaatactccacagagttgattgtaaatacagatagtgaatcgactatagacataatactatctggatctacacattcaccagaaactagttctgagaaaccagaggatatagataattttaattgctcgtcggtattcgaaatcgcgactccggaaccaattactgataatgtagaagatcatacagacaccgtcacatacactagtgatagcattaatacagtaagtgcatcatctggagaatccacaacagacgagactccggaaccaattactgataaagaagaagatcatacagtcacagacactgtctcatacactacagtaagtacatcatctggaattgtcactactaaatcaaccaccgatgatgcggatctttatgatacgtacaatgataatgatacagtaccaccaactactgtaggcggtagtacaacctctattagcaattataaaaccaaggactttgtagaaatatttggtattaccgcattaattatattgtcggccgtggcaatattctgtattacatattatatatataataaacgttcacgtaaatacaaaacagagaacaaagtctagatttttgacttacataaatgtctgggatagtaaaatctatcatattgagcggaccatctggttcaggaaagacagccatagccaaaagactatgggaatatatttggatttgtggtgtcccataccactagatttcctcgtcctatggaacgagaaggtgtcgattaccattacgttaacagagaggccatctggaagggaatagccgccggaaactttctagaacatactgagtttttaggaaatatttacggaacttctaaaactgctgtgaatacagcggctattaataatcgtatttgtgtgatggatctaaacatcgatggcgttagaagtcttaaaaatacgtacctaatgccttactcggtgtatataagacctacctctcttaaaatggttgagaccaagcttcgttgtagaaacactgaagcggatgatgagattcatcgtcgtgtgatgttggcaaaaactgacatggatgaggcaggtgaagccggtctattcgacactattatcattgaagatgatgtgaatttagcatatagtaagttaattcagatactacaggaccgtattagaatgtattttaacactaattagagacttaagacttaaaacttgataattaataatataactcgtttttatatgtggctatttcaacgtctaatgtattagttaaatattaaaacttaccacgtaaaacttaaaatttaaaatgatatttcattgacagatagatcacacattatgaactttcaaggacttgtgttaactgacaattgcaaaaatcaatgggtcgttggaccattaataggaaaaggtggattcggtagtatttatactactaatgacaataattatgtagtaaaaatagagcccaaagctaacggatcattatttaccgaacaggcattttatactagagtacttaaaccatccgttatcgaagaatggaaaaaatctcacaatataaagcacgtaggtcttatcacgtgcaaggcatttggtctatacaaatccattaatgtggaatatcgattcttggtaattaatagattaggtgcagatctagatgcggtgatcagagccaataataatagattaccaaaaaggtcggtgatgttgatcggaatcgaaatcttaaataccatacaatttatgcacgagcaaggatattctcacggagatattaaagcgagtaatatagtcttggatcaaatagataagaataaattatatctagtggattacggattggtttctaaattcatgtctaatggcgaacatgttccatttataagaaatccaaataaaatggataacggtactctagaatttacacctatagattcgcataaaggatacgttgtatctagacgtggagatctagaaacacttggatattgtatgattagatggttgggaggtatcttgccatggactaagatatctgaaacaaagaattgtgcattagtaagtgccacaaaacagaaatatgttaacaatactgcgactttgttaatgaccagtttgcaatatgcacctagagaattgctgcaatatattaccatggtaaactctttgacatattttgaggaacccaattacgacgagtttcggcacatattaatgcagggtgtatattattaagtgtggtgtttggtcgatgtaaaatttttgtcgataaaaattaaaaaataacttaatttattattgatctcgtgtgtacaaccgaaatcatggcgatgttttacgcacacgctctcggtgggtacgacgagaatcttcatgcctttcctggtacctgcagcggccgctcgagagctcctggtaaaagttaaacttggggagaatgatacagaaaatctttcttctactatatcggcggcaccatcgaggtaaccacctctcaagaagaccgcgtgaataatgtactcatgaaacgtttggaaactatacgccatatgtggtctgttgtatatgatcattttgatattgtgaatggtaaagaatgctgttatgtgcatacgcattcatctaatcaaaatcctataccgagtactgtaaaaacaaatttgtacatgaagactatgggatcatgcattcaaatggattccatggaagctctagagtatcttagcgaactgaaggaatcaggtggatggagtcccagaccagaaatgcaggaatttgaatatccagatggagtggaagacactgaatcaattgagagattggtagaggagttcttcaatagatcagaacttcaggctggtaaattagtcaaatttggtaattctattaattgttaaacatacatctgtttcagctaagcaactaagaacacgtatacggcagcagcttccttttatactctcatcttttaccaacacaaagggtggatatttgttcattggagttgataataatacacacaaagtatttggattcacggtgggttacgactacctcagactgatagagaatgatatagaaaagcatatcaaaagactttgtgttgtgcatttctgtgagaagaaagaggacatcaagtacacgtgtcgattcatcaaggtatataaacctggggatgaggctacctcgacatacgtgtgcgctatcaaagtggaaagatgctgttgtgctgtgtttgcagattggccagaatcatggtatatggatactaatggtatcaagaagtattctccagatgaatgggtgtcacatataaaattttaattaatgtaactatagagaacaaataataggttgtaatatcatatagacaataactaacaattaattagtaactgttatctcttttttaactaaccaactaactatatacctattaatacatcgtaattatagttcttaacatctattaatcattgattcgcttctttaattttttataaactaacattgttaattgaaaagggataacatgttacagaatataaattatatatggatttttttaaaaaggaaatacttgactggagtgtatatttatctcttcattatatagcacgcgtgtgttccaattcttccacatcccatataatacaggattataatctcgttcgaacatacgagaaagtggataaaacaatagttgattttttatctaggttgccaaatttattccatattttagaatatggggaaaatattctacatatttattctatggatgatgctaatacgaatattataattttttttctagatagagtattaaatattaataagaacgggtcatttatacacaatctcaggttatcatcatccattaatataaaagaatatgtatatcaattagttaataatgatcatccagataataggataagactaatgcttgaaaatggacgtagaacaagacattttttgtcctatatatcagatacagttaatatctatatatgtattttaataaatcatggattttatatagatgcagaagacagttacggttgtacattattacatagatgtatatatcactataagaaatcagaatcagaatcatacaatgaattaattaagatattgttaaataatggatccgatgtagataaaaaagatacgtacggaaacacaccttttatcctattatgtaaacacgatatcaacaacgtggaattgtttgagatatgtttagagaatgctaatatagactctgtagactttaatagatatacacctcttcattatgtctcatgtcgtaataaatatgattttgtaaagttattaatttctaaaggagcaaatgttaatgcgcgtaataaattcggaactactccattttattgtggaattatacacggtatctcgcttataaaactatatttggaatcagacacagagttagaaatagataatgaacatatagttcgtcatttaataatttttgatgctgttgaatctttagattatctattatccagaggagttattgatattaactatcgtactatatacaacgaaacatctatttacgacgctgtcagttataatgcgtataatacgttggtctatctattaaacagaaatggtgattttgagacgattactactagtggatgtacatgtatttcggaagcagtcgcaaacaacaacaaaataataatggaagtactattgtctaaacgaccatctttgaaaattatgatacagtctatgatagcaattactaaaaataaacaacataatgcagatttattgaaaatgtgtataaaatatactgcgtgtatgaccgattatgatactcttatagatgtacagtcgctacagcaatataaatggtatattttaaaatgtttcgatgaaatagatatcatgaagagatgttatataaaaaataaaactgtattccaattagttttttgtatcaaagacattaatactttaatgagatatggtaaacatccttctttcgtgaagtgcactagtctcgacgtatacggaagtcgtgtacgtaatatcatagcatctattagatatcgtcagagattaattagtctattatccaagaagctggatgcgggagataaatggtcgtgttttcctaacgaaataaaatataaaatattggaaaactttaacgataacgaactatccacatatctaaaaatcttataaacactattaaaatataaaatctaagtaggataaaatcacactacatcattgtttccttttagtgctcgacagtgtatactatttttaacactcataaataaaaatgaaaacgatttccgttgttacgttgttatgcgtactacctgctgttgtttattcaacatgtactgtacccactatgaataacgctaaattaacgtctaccgaaacatcgtttaatgataaacagaaagttacatttacatgtgatcagggatatcattctttggatccaaatgctgtctgcgaaacagataaatggaaatacgaaaatccatgcaagaaaatgtgcacagtttctgattatgtctctgaattatatgataagccattatacgaagtgaattccaccatgacactaagttgcaacggcgaaacaaaatattttcgttgcgaagaaaaaaatggaaatacttcttggaatgatactgttacgtgtcctaatgcggaatgtcaacctcttcaattagaacacggatcgtgtcaaccagttaaagaaaaatactcatttggggaatatatgactatcaactgtgatgttggatatgaggttattggtgcttcgtacataagttgtacagctaattcttggaatgttattccatcatgtcaacaaaaatgtgatataccgtctctatctaatggattaatttccggatctacattttctatcggtggcgttatacatcttagttgtaaaagtggttttatactaacgggatctccatcatccacatgtatcgacggtaaatggaatcccatactcccaacatgtgtacgatctaacgaaaaatttgatccagtggatgatggtcccgacgatgagacagatttgagcaaactctcgaaagacgttgtacaatatgaacaagaaatagaatcgttagaagcaacttatcatataatcatagtggcgttaacaattatgggcgtcatatttttaatctccgttatagtattagtttgttcctgtgacaaaaataatgaccaatataagttccataaattgctaccgtaaatataaatccgttaaaataattaataatttaataacaaacaagtatcaaaagattaaagacttatagctagaatcaattgagatgtcttcttcagtggatgttgatatctacgatgccgttagagcatttttactcaggcactattataacaagagatttattgtgtatggaagaagtaacgccatattacataatatatacaggctatttacaagatgcgccgttataccgttcgatgatatagtacgtactatgccaaatgaatcacgtgttaaacaatgggtgatggatacacttaatggtataatgatgaatgaacgcgatgtttctgtaagcgttggcaccggaatactattcatggaaatgtttttcgattacaataaaaatagtatcaacaatcaactaatgtatgatataattaatagcgtatctataattctagctaatgagagatatagaagcgcttttaacgacgatggtatatacatccgtagaaatatgattaacaagttgtacggatacgcatctctaactactattggcacgatcgctggaggtgtttgttattatctgttgatgcatctagttagtttgtataaataattatttcaatatactagttaaaattttaagattttaaatgtataaaaaactaataacgtttttatttgtaataggtgcattagcatcctattcgaataatgagtacactccgtttaataaactgagtgtaaaactctatatagatggagtagataatatagaaaattcatatactgatgataataatgaattggtgttaaattttaaagagtacacaatttctattattacagagtcatgcgacgtcggatttgattccatagatatagatgttataaacgactataaaattattgatatgtataccattgactcgtctactattcaacgcagaggtcacacgtgtagaatatctaccaaattatcatgccattatgataagtacccttatattcacaaatatgatggtgatgagcaacaatattctattactgcagagggaaaatgctataaaggaataaaatatgaaataagtatgatcaacgatgatactctattgagaaaacatactcttaaaattggatctacttatatatttgatcgtcatggacatagtaatacatattattcaaaatatgatttttaaaaatttaaaatatattatcacttcagtgacagtagtcaaataacaaacaacaccatgagatatattataattctcgcagttttgttcattaatagtatacacgctaaaataactagttataagtttgaatccgtcaattttgattccaaaattgaatggactggggatggtctatacaatatatcccttaaaaattatggcatcaagacgtggcaaacaatgtatacaaatgtaccagaaggaacatacgacatatccgcatttccaaagaatgatttcgtatctttctgggttaaatttgaacaaggcgattataaagtggaagagtattgtacgggactatgcgtcgaagtaaaaattggaccaccgactgtaacattgactgaatacgacgaccatatcaatttgtacatcgagcatccgtatgctactagaggtagcaaaaagattcctatttacaaacgcggtgacatgtgtgatatctacttgttgtatacggctaacttcacattcggagattctaaagaaccagtaccatatgatatcgatgactacgattgcacgtctacaggttgcagcatagactttgtcacaacagaaaaagtgtgcgtgacagcacagggagccacagaagggtttctcgaaaaaattactccatggagttcgaaagtatgtctgacacctaaaaagagtgtatatacatgcgcaattagatccaaagaagatgttcccaatttcaaggacaaaatggccagagttatcaagagaaaatttaataaacagtctcaatcttatttaactaaatttctcggtagcacatcaaatgatgttaccacttttcttagcatgcttaacttgactaaatattcataactaatttttattaatgatacaaaaacgaaataaaactgcatattatacactggttaacgcccttataggctctaaccattttcaagatgaggtccctgattatagtccttctgttcccctctatcatctactccatgtctattagacgatgtgagaagactgaagaggaaacatggggattgaaaatagggttgtgtataattgccaaagatttctatcccgaaagaactgattgcagtgttcatctcccaactgcaagtgaaggattgataactgaaggcaatggattcagggatatacgaaacaccgataaattataaaaaaagcaatgtgtccgctgtttccgttaataatactattttcgtaactggcggattattcataaataactctaatagcacgatcgtggttaacaatatggaaaaacttgacatttataaagacaaacaatggtcgattatagaaatgcctatggctagggtatatcacggcatcgactcgacatttggaatgttatattttgccggaggtctatccgttaccgaacaatatggtaatttagagaaaaacaacgagatatcttgttacaatcctagaacgaataagtggtttgatatttcatatactatttataagatatccatatcatcattgtgtaaactaaataacgtcttctatgtatttagtaaggacattggatatgtggaaaagtatgatggtgcatggaagttagtacatgatcgtctccccgctataaaggcattatcaacttctccttattgattgaaaatgaaaatataaatagtttttatgtatagcagtattaccctatagttttattgcttactactaacatggatacagatgttacaaatgtagaagatatcataaatgaaatagatagagagaaagaagaaatactaaaaaatgtagaaattgaaaataataaaaacattaacaagaatcatccaagtggatatattagagaagcactcgttattaatacaagtagtaatagtgattccattgataaagaagttatagaatgtatcagtcacgatgtaggaatatagatcatatctactaatttttataatcgatacaaaacataaaaaacaactcgttattacatagcaggcatggaatccttcaagtattgttttgataacgatggcaagaaatggattatcggaaatactttatattctggtaattcaatactatataaggtcagaaaaaatttcactagttcgttctacaattacgtaatgaaaatagatcacaaatcacacaagccattgttgtctgaaatacgattctatatatctgtattggatcctttgactatcgacaactggacacgggaacgtggtataaagtatttggctattccagatctgtatggaattggagaaaccgatgattatatgttcttcgttataaagaattcgggaagagtattcgccccaaaggatactgaatcagtcttcgaagcatgcgtcactatgataaacacgttagagtttatacactctcgaggatttacccatggaaaaatagaaccgaggaatatactgattagaaataaacgtctttcactaattgactattctagaactaacaaactatacaagagtggaaactcacatatagattacaacgaggacatgataacttcaggaaatatcaattatatgtgtgtagacaatcatcttggagcaacagtttcaaaacgaggagatttagaaatgttgggatattgcatgatagaatggttcggtggcaaacttccatggaaaaacgaaagtagtataaaagtaataaaacaaaaaaaagaatataaaaaatttatagctactttctttgaggactgttttcctgaaggaaatgaacctctggaattagttagatatatagaattagtatacacgttagattattctcaaactcctaattatgacagactacgtaaactgtttatacaagattgaaattatattctttttttatagagtgtggtagtgttacggatatctaatattaatattagactatctctatcgcgctacacgaccaatatcgattactatggatatcttcagggaaatcgcatcttctatgaaaggagagaatgtattcatttctccagcgtcaatctcgtcagtattgacaatactgtattatggagctaatggatccactgctgaacagctatcaaaatatgtagaaacggaggagaacacggataaggttagcgctcagaatatctcattcaaatccatgaataaagtatatgggcgatattctgccgtgtttaaagattcctttttgagaaaaattggcgataagtttcaaactgttgacttcactgattgtcgcactatagatgcaatcaacaagtgtgtagatatctttactgaggggaaaatcaatccactattggatgaaccattgtctcctgatacctgtctcctagcaattagtgccgtatactttaaagcaaaatggttgatgccattcgaaaaggaatttaccagtgattatcccttttacgtatctccgacggaaatggtagatgtaagtatgatgtctatgtacggcaaggcatttaatcacgcatctgtaaaggaatcattcggcaacttttcaatcatagaactgccatatgttggagatactagtatgatggtcattcttccagacaagattgatggattagaatccatagaacaaaatctaacagatacaaattttaagaaatggtgtaactctctggaagctacgtttatcgatgttcacattcccaagtttaaggtaacaggttcgtataatcttgtggatactctagtaaagtcaggactgacagaggtgttcggttcaactggagattatagcaatatgtgtaattcagatgtgagtgtcgacgctatgattcacaaaacgtatatagatgtcaatgaagagtatacagaagcagctgcagcaacttgtgcactggtgtcagactgtgcatcaacaattacaaatgagttctgtgtagatcatccgttcatctatgtgattaggcatgttgatggaaaaattcttttcgttggtagatattgctctccgacaactaattgttaaccattttttttaaaaaaatagaaaaaacatgtggtattagtgcaggtcgttgttcttccaattgcaattggtaagatgacggccaactttagtacccacgtcttttcaccacagcactgtggatgtgacagactgaccagtattgatgacgtcagacaatgtttgactgaatatatttattggtcgtcctatgcataccgcaacaggcaatgcgctggacagttgtattccacactcctctcttttagagatgatgcggaatcagtgttcatcgacattcgcgagctggtaaaaaatatgccgtgggatgatgtcaaagattgtacagaaatcatccgttgttatataccggatgagcaaaaaaccatcagagagatttcggccatcatcggactttgtgcatatgctgctacttactggggaggtgaagaccatcccactagtaacagtctgaacgcattgtttgtgatgcttgagatgctcaattacgtggattataacatcatattccggcgtatgaattgatgagttgtacatcttgacattttctttcttctcttctccctttcttctcttctcccttcctccctcttctccctttcccagaaacaaacttttttacccactataaaataaaatgagtatactacctattatatttcttcctatatttttttattcttcattcgttcagacttttaacgcgcctgaatgtatcgacaaagggcaatattttgcatcattcatggagttagaaaacgagccagtaatcttaccatgtcctcaaataaatacgctatcatccggatataatatattagatattttatgggaaaaacgaggagcggataatgatagaattataccgatagataatggtagcaatatgctaattctgaacccgacacaatcagactctggtatttatatatgcattaccacgaacgaaacctactgtgacatgatgtcgttaaatttgacaatcgtgtctgtctcagaatcaaatatagatcttatctcgtatccacaaatagtaaatgagagatctactggcgaaatggtatgtcccaatattaatgcatttattgctagtaacgtaaacgcagatattatatggagcggacatcgacgccttagaaataagagacttaaacaacggacacctggaattattaccatagaagatgttagaaaaaatgatgctggttattatacatgtgttttagaatatatatacagaggtaaaacatataacgtaaccagaattgtaaaattagaggtacgggataaaataataccttctactatgcaattaccagatggcattgtaacttcaataggtagtaatttgactattgcgtgtagagtatcgttgagacctcccacaacggatgcagacgtcttttggataagtaatggtatgtattacgaagaagatgatggggacggagacggtagaataagtgtagcaaataaaatctatatgaccgataagagacgtgttattacatcccggttaaacattaatcctgtcaaggaagaagatgctacaacgtttacgtgtatggcgtttactattcctagcatcagcaaaacagttactgttagtataacgtgaatgtatgttgttacatttccatgtcaattgagtttataagaatttttatacattatcttccaacaaacaattgacgaacgtattgctatgattaactcccacgatactatgcatattattaatcattaacttgcagactatacctagtgctattttgacatactcatgttcttgtgtaattgcggtatctatattattaaagtacgtaaatctagctatagttttattatttaattttagataatataccgtctccttatttttaaaaattgccacatcctttattaaatcatgaatgggaatttctatgtcatcgttagtatattgtgaacaacaagagcagatatctataggaaagggtggaatgcgatacattgatctatgtagttttaaaacacacgcgaactttgaagaatttatataaatcattccatcgatacatccttctatgttgacatgtatatatccaggaattcttttattaatgtcaggaaatgtataaactaaaacattgcccgaaagcggtgcctctatctgcgttatatccgttcttaacttacaaaatgtaaccaatacctttgcatgacttgttttgttcggcaacgttagtttaaacttgacgaatggattaattacaatagcatgatccgcgcatctattaagtttttttactttaacgcccttgtatgtttttacagagactttatctaaatttctagtacttgtatgtgttataaatataacgggatatagaactgaatcacctaccttagatacccaattacattttatcagatccagataataaacaaattttgtcgccctaactaattctatattgttatatattttacaattggttatgatatcatgtaataacttggagtctaacgcgcatcgtcgtacgtttatacaattgtgatttagtgtagtatatctacacatgtatttttccgcactatagtattctggactagtgataaaactatcgttatatctgtcttcaatgaactcatcgagatattgctctctgtcatattcatacacctgcataaactttctagacatcttacaatccgtgttattttaggatcatatttacatatttacgggtatatcaaagatgttagattagttaatgggaatcgtctataataatgaatattaaacaattatatgaggacttttaccacaaagcatcataaaaatgagtcgtcgtctgatttatgttttaaatatcaaccgcaaatcaactcataaaatacaagagaatgaaatatatacatattttagtcattgcaatatagaccatacttctacagaacttgattttgtagttaaaaactatgatctaaacagacgacaacatgtaactgggtatactgcactacactgctatttgtataataattactttacaaacgatgtactgaagatattattaaatcatgacgtaaatgtaacgatgaaaaccagtagcggacgtatgcctgtttatatattgcttactagatgttgcaatatttcacatgatgtagtgatagatatgatagacaaagataaaaaccacttattacatagagactattccaacctattactagagtatataaaatctcgttacatgttattaaaggaagaggatatcgatgagaacatagtatccactttattagataagggaatcgatcctaactttaaacaagacggatatacagcgttacattattattatttgtgtctcgcacacgtttataaaccaggtgagtgtagaaaaccgataacgataaaaaaggccaagcgaattatttctttgtttatacaacatggagctaatctaaacgcgttagataattgtggtaatacaccattccatttgtatcttagtattgaaatgtgtaataatattcatatgactaaaatgctgttgacttttaatccgaatttcaaaatatgtaataatcatggattaacgcctatactatgttatataacttccgactacatacaacacgatattcttgttatgttaatacatcactatgaaacaaatgttggagaaatgccgatagatgagcgtcgtatgatcgtattcgagtttatcaaaacatattctacacgtccggcagattcgataacttatttgatgaataggtttaaaaatataaatatttatacccgctatgaaggaaagacattattacacgtagcatgtgaatataataatacacacgtaatagattatcttatacgtatcaacggagatataaatgcgttaaccgacaataacaaacacgctacacaactcattatagataacaaagaaaattccccgtataccatcgattgtttactgtatatacttagatatattgtagataagaatgtgataagatcgttggtggatcaacttccatctctacctatcttcgatataaaatcatttgagaaattcatatcctactgtatacttttagatgacacattttacgataggcacgttaagaatcgcgattctaaaacgtatcgatacgcattttcaaaatacatgtcgtttgataaatacgatggtataataactaaatgtcacgacgaaacaatgttactcaaactgtccactgttctagacactacactatatgcagttttaagatgccataattcgaaaaagttaagaagatacctcaacgagttaaaaaaatataataacgataagtcctttaaaatatattctaatattatgaatgagagataccttaatgtatattataaagatatgtacgtgtcaaaggtatatgataaactatttcctgttttcacagataaaaattgtctactaacattactaccttcagaaattatatacgaaatattatacatgctgacaattaacgatctttataatatatcgtatccacctaccaaagtatagttgtatttttctcatgcgatgtgtgtaaaaaaactgatattatataaatattttagtgccgtataataaagatgacgatgaaaatgatggtacatatatatttcgtatcattattgttattgctattccacagttacgccatagacatcgaaaatgaaatcacagaattcttcaataaaatgagagatactctaccagctaaagactctaaatggttgaatccagcatgtatgttcggaggcacaatgaatgatatagccgctctaggagagccattcagcgcaaagtgtcctcctattgaagacagtcttttatcgcacagatataaagactatgtggttaaatgggagaggctagaaaagaatagacggcgacaggtttctaataaacgtgttaaacatggtgatttatggatagccaactatacatctaaattcagtaaccgtaggtatttgtgtaccgtaactacaaagaatggtgactgtgttcagggtatagttagatctcatattaaaaaacctccttcatgcattccaaaaacatatgaactaggtactcatgataagtatggcatagacttatactgtggaattctttacgcaaaacattataataatataacttggtataaagataataaggaaattaatatcgacgacattaagtattcacaaacgggaaagaaattaattattcataatccagagttagaagatagtggaagatacaactgttacgttcattacgacgacgttagaatcaagaatgatatcgtagtatcaagatgtaaaatacttacggttataccgtcgcaagaccacaggtttaaactaatactagatccaaaaatcaacgtaacgataggagaacctgccaatataacatgcactgctgtgtcaacgtcattattgattgacgatgtactgattgaatgggaaaatccatccggatggcttataggattcgattttgatgtatactctgttttaactagtagaggcggtattaccgaggcgaccttgtactttgaaaatgttactgaagaatatataggtaatacatataaatgtcgtggacacaactattattttgaaaaaacccttacaactacagtagtattggagtaaatacacaatgcatttttatatacattactgaataattattattattatttatatcgtatttgtgctataacgcgactatctaggtatttgtatctcactgatagagaacatataaatatagactctattaaacagttgtgtaaaatatcaaatcctaatagatgtggatgtacggctttacatgagtacttttataattatagatcagtcaacggaaaatacaagtatagatacaacggttactatcaatattatttatctagcgattatgaaaattataatgaatattattatgatgattatgatagaactggtatgaacagtgagagtgataatatatcaatcaaaacagaatatgaattctatgatgaaacacaagatcaaagtacacaactagtaggttacgacattaaactcaaaaccaatgaggatgattttatggctatgatagatcagtgggtgtccatgattatatagatgaatcaattaataaagtagtatatggaagagagtctcacgtaagatggcgggatatatggcaagaacataatgatggcgtatacagtataggaaaggagtgcatagataatatatacgaagacaaccataccgtagacgaattctacaagatagacagcgtatcagatgtagatgacgcggaacacatatctccgataactaatgatgtatctacacaaacatgggaaaagaaatcagagttagatagatacatggaaatgtatcctcgtcatagatatagtaagcattctgtctttaagggattttctgacaaagttagaaaaaatgatttagacatgaatgtggtaaaagaattactttctaacggtgcatctctaacaattaaggatagcagtaataaggatccaataaccgtttattttcgaagaacgataatgaatttagaaatgattgatattattaacaaacatacaactattgatgaacgaaagtatatagtacactcctatctaaaaaattataaaaatttcgattatccatttttcaggaagttagttttgactaataaacattgtctcaacaattattataatataagcgacagcaaatatggaacaccgctacatatattggcgtctaataaaaaattaataactcctaattacatgaagttattagtgtataacggaaatgatataaacgcacgaggtgaagatacacaaatgcgaactccattacacaaatatttgtgtaaatttgtatatcataatattgaatatggtatccgatactataatgaaaagattatagacgcatttatagagttaggagccgatctaactattccaaataacgatggaatgataccagtagtttactgtatacactcaaatgcagaatatggttataacaatattactaacataaagataatacgtaaactacttaatcttagtagacgtgcgtcacataatctatttagagatcgagtcatgcacgattatataagtaatacatatattgatcttgagtgtttagatattattagatcgttggatggattcgatatcaatggttactttgaaggacgtacaccacttcattgcgctatacaacataacttcactcagattgctaagtacttattagatcgaggagctgatatagtcgtacccaacacattgattatacatcagtacatacagtaaatagcatagatatggaggaggatacaaatatttcaaataaagttataaggtacaacactgtcaataatatatggaagacattacctaacttctggactggaactataaatccaggcgtggtctcgcataaagatgatatatatgttgtatgcgacatcaaagatgaaaaaaatgttaagacttgtatatttagatataacacgaatacgtataacggatgggaattggttacgacgacagaaagcagattatcagctctgcatactattcttcatgacaataccataatgatgttacattgttatgaatcgtatatgttacaagatacatttaatgtgtacactcgcgaatggaatcatatgtgtcatcaacattcgaatagttatatcatgtacaatatactacccatctactaaatataatagaataaaataaatgagtatgatcattttagataacgattgattttatcattaccgcttcattcttatattctttgcttacggaacctatatttagaaacatctactaacgattttttatgcttgcattattaatggtatgtaatatgattgattgtgtacgcaataccaatttgttaagtatgaatacggggtacaaacataaactgaaatttaacattatttatttatgatatatatcgttatcgttattgtttggtctataccatggatatctttaaagaactaatcttaaaacaccctgatgaaaatgttttgatttctccagtttctattttatctactttatctattctaaatcatggagcagctggttctacagctgaacaactatcaaaatatatagagaatatgaatgagaatacacccgatgataagaaggatgacaataatgacatggacgtagatattccgtattgtgcgacactagctaccgcaaataaaatatacggtagcgatagtatcgagttccacgcctccttcctacaaaaaataaaagacgattttcaaactgtaaactttaataatgctaaccaaacaaaggaactaatcaacgaatgggttaagacgatgacaaatggtaaaattaattccttattgactagtccgctatccattaatactcgtatgacagttgttagcgccgtccattttaaagcaatgtggaaatatccattttctaaacatcttacatatacagacaagttttatatttctaagaatatagttaccagtgttgatatgatggtgggtaccgagaataacttgcaatatgtacatattaatgaattattcggaggattctctattatcgatattccatacgagggaaactctagtatggtaattatactaccggacgacatagaaggtatatataacatagaaaaaaatataacagatgaaaaatttaaaaaatggtgtggtatgttatctactaaaagtatagacttgtatatgccaaagtttaaagtggaaatgacagaaccgtataatctggtaccgattttagaaaatttaggacttactaatatattcggatattatgcagattttagcaagatgtgtaatgaaactatcactgtagaaaaatttctacatacgacgtttatagatgttaatgaggagtatacagaagcatcggccgttacaggagtatttatgactaacttttcgatggtatatcgtacgaaggtctacataaaccatccattcatgtacatgattaaagacaacacaggacgtatactttttatagggaaatactgctatccgcaataaatataaacaaatagacttttatcacgtttatctatgtctaaatattacaaatagtaatagtataaactaaagctgataatacttaaaaaaataataatatcatttacaattaatagtataaactaaaaattaaacaaatcgttattataagtaatatcaaaatgatgatatacggattaatagcgtgtcttatattcgtgacttcatccatcgctagtccactttatattcccgttattccacccattacggaagataaatcgttcaatagtgtagaggtattagtttccttgtttagagatgaccaaaaagactatacggtaacttctcagttcaataactacactatcgataccaaagactggactatcggcgtactatccacacctgatggtttggatataccattgactaatataacttattggtcacggtttactataggtcgtgcattgttcaaatcagagtctgaggatattttccaaaagaaaatgagtattctaggtgtttctatagaatgtaagaagtcgtcgacattacttacttttttgaccgtgcgtaaaatgactcgagtatttaataaatttccagatatggcttattatcgaggagactgtttaaaagccgtttatgtaacaatgacttataaaaatactaaaactggagagactgattacacgtacctctctaatggggggttgcctgcatactatcgtaatggggtcgatggttgattattgattagtatattccttattcacacaaaaagaacatttttataaacatgaaaccactgtctaaatgtaattatgatcttgatttatagatgaagatcagcctttagaggattttaaccagtatgtttaatatgaaaaaaataaacataacatattttgagattaagcgctattgtgcttaattattttgctctataaactgaatatatagccacaattattgacgggcttgtttatgaccggcaatcatgaatttacagaaattatctctggctatatatcttactgcgacatgttcgtggtgttatgaaacatgcataagaaaaactgcgttgtatcatgacattcaattggagcatgtagaagacaataaagatagtgtagcgtcgctaccgtacaagtagtcaatcaaagagaacgtagtagattgttggctacatttaattggacagatatagctgagggtgttagaaatgagttcattaaaatatgtgatatcaacggaacatatttatataattatactattgctgttagtataattattgattccacggaagaactaccaacagttactccaattacaacaacatatgaaccttctacatataattatactatcgatgatagcactgttattactactgaagaactacaagtgactcctcatatggatctccatcgatgatacatgtattaaaatactttccgaataagtcttttaaatattgtattaattatgaaaaactatgctatgcgagtatgatgcaaagatgtttaatgatacgatactagattttatctctagcgagagatgtcgttagaatcatttatcataactacgtttaataataattcatcaacgaatatcgataacatgtgtcatttatacgttaaagtctgtccgtcttctctattgtttagactgtttgtagaatgctgtgatataaacaaactagtagaaggtacgactccgttacactgttatctaatgaatgaaggatttgaatcatctgttttaaaaaacctattaaaggagtatgtcatgaatacgtttaatgttcatgacatccattacacaaatatttaactcatgatgaagttgagaatgatatgctttctgatagtatagatagctttagctaatataaaaatatattaatccactatatattctagacttgatttaaaaccgataaactactactacgtactgtataagttgttaaaaaaaggagcagaccctaattatgtagatgatagaggtaatacttttcttcattacttctgcatctatatgtccacttatgagaaaacgtcatttaataagatgcatcgtgaaaagaaatttattaaagagttggtaaaatatgaaaccgaaagtaaataatataggaaatacacctctacataactacgtatctcaatatgatatcactctcattcctcatccacaacccattaaaaaaatggaaattaaagccctctattagcataaacggctacaggtctacctttacaatggcctctccttgtgcccagttcagaccctgtcattgccacgctactaaggactccctgaataccgtggccgacgtcagacattgtctgactgaatacatcctgtgggtttctcatagatggacccatagagaaagcgcagggtctctctacaggcttctcatctctttcagaactgatgcaacggagctctttggtggtgagttgaaggattcacttccgtgggacaatatcgacaattgcgtggagatcattaaatgtttcatcagaaatgactccatgaaaaccgccgaagaacttcgtgcaatcattggactttgtactcaatcagctatcgtctctggaagagtcttcaacgataagtatatcgacatactacttatgctgcgaaagattctgaacgagaacgactatctcaccctcttggatcatatccgcactgctaaatactaaatctccttcatgctctctcactacactttttatcatcttatgaggaatgattgccttcatcatttttcgtgaaataggaataattagcaccagaatagctatggattgcacatgtattctatgtcgtctactggatgaagatgtgacgtacaaaaaaataaaactagaaattgaaacgtgtcacaacttatcaaaacatatagatagacgaggaaacaatgcgctacattgttacgtcttcaataaatgcgatacagacattaagattgttcgactgttactctctcgcggagtcgagagactttgtagaaacaacgaaggattaactccgctaggagcatacagtaagcatagatacgtaaaatctcaaattgtgcatctactgatatccagctattcgaattcctctaacgaactcaagtcgaatataaatgatttcgatctgtattcgtatatgtcttcggataatatcgacttacgtctgctaaaatacctaattgtggataaacggatacgtccgtccaagaatacgaattatgcaatcaatggtctcggattggtggatatatacgtaacgacgcctaatccgagaccagaagtattgctatggcttcttaaatcagaatgttacagcaccggttacgtatttcgtacctgtatgtacgacagtgatatgtgtaagaactctcttcattactatatatcgtctcatagagaatctcaatctctatccaaggatgtaattaaatgtttgatcaataacaatgtttccatccatggcagagacgaaggaggatctttacccatccaatactactggtcttgctcaaccatagatatagagattgttaaattattaataaaggatgtggacacgtgtagagtatacgacgtcagccctatattagaggcggattatctaaacaagcgatttagagtaaccccatataatgtagacatggaaatcgttaatcttcttattgagagacgtcatactcttgtcgacgtaatgcgtagtattacttcttacgattccagagactataaccactacatcatcgataacattctaaagagatttagacaacaggatgaatccatcgtacaagccatgttgataaactacttacattacggcgatatggtcgttcgatgcatgttagataacggacaacaactatcctctgcacgactactttgttaataataatctcgtcgatgtaaacgtcgtaaggtttatcgtggaaaataatggacacatggctgtaaatcacgtatcgaacaatggccgtctatgtatgtacggtctgatattatcgagatttaataattgcgggtatcactgttatgaaaccatactaatagatgtatttgatatactaagcaagtacatggataatatagatatgatcgataatgagaataaaactctactatattacgcggtcgatgtcaataatatacaatttgcaaagcggttattggaatatggagcgagtgttacaacatcacgctcgataatcaatacggccatccagaaaagtagttacagaagagaaaacaaaacgaggatagttgatttattacttagctaccatcccactctagagactatgattgacgcatttaatagagatatacgctatctatatcctgaaccattattcgcctgtatcagatacgccttaatcctagatgatgattttccttctaaagtaagtatgatatctccggtcgtcataaggaactaaagcgctatagagtagacattaatagaatgaagaatgcctacatatcaggcgtctccatgtttgatatattatttaaacgaagcaaacgccacagattgagatacgcaaagaatccgacatcaaatggtacaaaaaagaactaacgtccatcattacagaaactgtaaagaacaatgagaggatcgactccatagtggacaacattaatacagacgataacttgatttcgaaattacccatggagatactttattactccattaaataatttatcatggagcgataatgtcctgtttcatttgtttccatgacatattacaaaatcgattccgtccaagatgataaaaacatttaccggcatcataaacacggagtttattttatatgtctcgcataaacattactaaaaaaatatattgttcggttttctttcacatctttaattatgaaaaagtaaatcattatgagatggacgagattgtacgcatcgttcgcgacagtatgtggtacatacctaacgtatttatggacgacggtaagaatgaaggtcacgtttctgtcaacaatgtttgtcatatgtattttacgttctttgatgtggatacatcgtctcatctgtttaagctagttattaaacactgcgatctgaataaacgaggtaactctccattacattgctatacgatgaatacacgatttaatccatctgtattaaagatattgttacaccacggcatgcgtaactttgatagcaaggatgaaaaaggacatattcctctacaccactatctgattcattcactatcaatcgataacaagatctttgatatactaacggacaccattgatgactttagtaaatcatccgatctattgctgtgttatcttagatataaattcaatgggagcttaaactattacgttctgtacaaaggatccgaccctaattgcgtcgacgaggatggactcacttctcttcattactactgtaaacacatatccacgttctacaaaagcaattattacaagttaagtcacactaagatgcgagccgagaagcgattcatctacgcgataatagattatggagcaaacattaacgcggttacacacttaccttcaacagtataccaaacatagtcctcgtgtggtgtatgctcttttatctcgaggagccgatacgaggatacgtaataatcttgattgtacacccatcatggaacgattgtgcaacaggtcatattctcataatgttactcaattggcacgaacaaaaggaagaaggacaacatctactttatctattcataaaacataatcaaggatacactctcaatatactacggtatctactagataggttcgacattcagaaagacgaatactataataccgcctttcaaaattgtaacaacaatgttgcctcatacatcggatacgacatcaaccttccgactaaagacggtattcgacttggtgtttgaaaacagaaacatcatatacaaggcggatgttgtgaatgacatcatccaccacagactgaaagtatctctacctatgattaaatcgttgttctacaagatgtcagaattctctccctacgacgattactacgtaaaaaagatactagcctactgcctattaagggacgagtcattcgcggaactacatagtaaattctgtttaaacgaggactataaaagtgtatttatgaaaaatatatcattcgataagatagattccatcatcgtgacataagtcgccttaaagagattcgaatctccgacaccgacctgtatacggtatcacagctatcttaaagccatacattcggacagacacatttcatttcccatgtacgacgatctcatagaacagtgccatctatcgatggagcataaaagtaaactcgtcgacaaagcactcaataaattagagtctaccatcggtcaatctagactatcgtatttgcctccggaaattatgcgcaatatcatctaaacagtatgttgtacggaaagaaccattacaaatattatccatgatagaaagaaaatatctatatgattggagaagtaggaaacaggaacaagacgacgattactacattattaaatcatgaagtccgtattatactcgtatatattgtttctctcatgtataataataaacggaagagatatagcaccgcatgcaccatccgatggaaagtgtaaagacaacgaatacaaacgccataatttgtgtccgggaacatacgcttccagattatgcgatagcaagactaacacacgatgtacaccctgtggttcgggtaccttcacatctcgcaataatcatttacccgcttgtctaagttgtaacggaagacgcgatcgtgtaacacgactcacaatagaatctgtgaatgctctcccggatattattgtcttctcaaaggatcatccggatgcaaggcatgtgtttcccaaacaaaatgtggaataggatacggagtatccggagacgtcatctgttctccgtgtggtctcggaacatattctcacaccgtctcttccgcagataaatgcgaacccgtacccagtaatacctttaactatatcgatgtggaaattaatctgtatcccgtcaacgacacgtcgtgtactcggacgaccactaccggtctcagtgaatccatctcaacgtcggaactaactattactatgaatcataaagactgtaatcccgtatttcgtgaggaatacttctctgtccttaataaggtagcaacttcaggtttctttacaggagaaaggtgtgcactctgaatttcgagattaaatgcaataacaaagattcttcctccaaacagttaacgaaagcaaagaatgatgacggtatcatgccgcattcggagacagtaactctagtgggcgactgtatatctagcgtcgacatctatatactatatagtaataccaatactcaagactacgaaactgatacaatctcttatcatgtgggtaatgttctcgatgtcgatagccatatgcccggtagttgcgatatacataaactgatcactaattccaaacccacccgctttttatagtaagtttttcacccataaataataaatacaataattaatttctcgtaaaagtagaaaatatattctaatttattgcatggtaaggaagtagaatcataaagaacagtactcaatcaatagcaattatgaaacaatatatcgtcctggcatgcatgtgcctgccagtcttcagcaatcatcctcatcctcatcctcgtgtacggaagaagaaaacaaacatcatatgggaatcgatgttattatcaaagtcacaaagcaagaccaaacaccgaccaatgataagatttgccaatccgtaacggaaattacagagtccgagtcagatccaaatcccgaggtggaatcagaagatgattccacatcagtcgaggatgtagatcctcctaccacttattactccatcatcggtggaggtctgagaatgaactttggattcaccaaatgtcctcagattaaatccatctcagaatccgctgatggaaacacagtgaatgctagattgtccagcgtgtccccaggacaaggtaaggactctcccgcgatcactcatgaagaagctcttgctatgatcaaagactgtgaggtgtctatcgacatcagatgtagcgaagaagagaaagacagcgacatcaagacccatccagtactcgggtctaacatctctcataagaaagtgagttacgaagatatcatcggttcaacgatcgtcgatacaaaatgtgtcaagaatctagagtttagcgttcgtatcggagacatgtgcaaggaatcatctgaacttgaggtcaaggatggattcaagtatgtcgacggatcggcatctgaaggtgcaaccgatgatacttcactcatcgattcaacaaaactcaaagcgtgtgtctgaatcgataactctattcatctgaaattggatgagtagggttaatcgaacgattcaggcacaccacgaattaaaaaagtgtaccggacactatattccggtttgcaaaacaaaaatgttcttaactacattcacaaaaagttacctctcgcgacttcttctttttctgtctcaatagtgtgatacgattatgacactattcctattcctattcctatttcctttcagggtatcacaaaaatattaaacctctttctgatggtctcataaaaaaagttttacaaaaatatttttattctctttctctctttgatggtctcataaaaaaagttttacaaaaatatttttattctctttctctctttgat

SEQ ID NO: 81 - DNA, 197052 bp, Vaccinia virus
  source 1..197052: mol_type = genomic DNA
  misc_difference 1..197052: note = VIR102
atcaaagagagaaagagaataaaaatatttttgtaaaactttttttatgagaccatcaaagagagaaagagaataaaaatatttttgtaaaactttttttatgagaccatcagaaagaggtttaatatttttgtgataccctgaaaggaaataggaataggaataggaatagtgtcataatcgtatcacactattgagacagaaaaagaagaagtcgcgagaggtaactttttgtgaatgtagttaagaacatttttgttttgcaaaccggaatatagtgtccggtacacttttttaattcgtggtgtgcctgaatcgttcgattaaccctactcatccaatttcagatgaatagagttatcgattcagacacacgctttgagttttgttgaatcgatgagtgaagtatcatcggttgcaccttcagatgccgatccgtcgacatacttgaatccatccttgacctcaagttcagatgattccttgcacatgtctccgatacgaacgctaaactctagattcttgacacattttgtatcgacgatcgttgaaccgatgatatcttcgtaactcactttcttatgagagatgttagacccgagtactggatgggtcttgatgtcgctgtctttctcttcttcgctacatctgatgtcgatagacacctcacagtctttgatcatagcaagagcttcttcatgagtgatcgcgggagagtccttaccttgtcctggggacacgctggacaatctagcattcactgtgtttccatcagcggattctgagatggatttaatctgaggacatttggtgaatccaaagttcattctcagacctccaccgatgatggagtaataagtggtaggaggatctacatcctcgactgatgtggaatcatcttctgattccacctcgggatttggatctgactcggactctgtaatttccgttacggattggcaaatcttatcattggtcggtgtttggtcttgctttgtgactttgataataacatcgattcccatatgatgtttgttttcttcttccgtacacgaggatgaggatgaggatgattgctgaagactggcaggcacatgcatgccaggacgatatattgtttcataattgctattgattgagtactgttctttatgattctacttccttaccatgcaataaattagaatatattttctacttttacgagaaattaattattgtatttattatttatgggtgaaaaacttactataaaaagcgggtgggtttggaattagtgatcagtttatgtatatcgcaactaccgggcatatggctatcgacatcgagaacattacccacatgataagagattgtatcagtttcgtagtcttgagtattggtattactatatagtatatagatgtcgacgctagatatacagtcgcccactagagttactgtctccgaatgcggcatgataccgtcatcattctttgctttcgttaactgtttggaggaagaatctttgttattgcatttaatctcgaaattcagagtgcacacctttctcctgtaaagaaacctgaagttgctaccttattaaggacagagaagtattcctcacgaaatacgggattacagtctttatgattcatagtaatagttagttccgacgttgagatggattcactgagaccggtagtggtcgtccgagtacacgacgtgtcgttgacgggatacagattaatttccacatcgatatagttaaaggtattactgggtacgggttcgcatttatctgcggaagagacggtgtgagaatatgttccgagaccacacggagaacagatgacgtctccggatactccgtatcctattccacattttgtttgggaaacacatgccttgcatccggatgatcctttgagaagacaataatatccgggagagcattcacagattctattgtgagtcgtgttacacgatcgcgtcttccgttacaacttagacaagcgggtaaatgattattgcgagatgtgaaggtacccgaaccacagggtgtacatcgtgtgttagtcttgctatcgcataatctggaagcgtatgttcccggacacaaattatggcgtttgtattcgttgtctttacactttccatcggatggtgcatgcggtgctatatctcttccgtttattattatacatgagagaaacaatatatacgagtataatacggacttcatgatttaataatgtagtaatcgtcgtcttgttcctgtttcctacttctccaatcatatagatattttctttctatcatggataatatttgtaatggttctttccgtacaacatactgtttagatgatattgcgcataatttccggaggcaaatacgatagtctagattgaccgatggtagactctaatttattgagtgctttgtcgacgagtttacttttatgctccatcgatagatggcactgttctatgagatcgtcgtacatgggaaatgaaatgtgtctgtccgaatgtatggctttaagatagctgtgataccgtatacaggtcggtgtcggagattcgaatctctttaaggcgacttatgtcacgatgatggaatctatcttatcgaatgatatatttttcataaatacacttttatagtcctcgtttaaacagaatttactatgtagttccgcgaatgactcgtcccttaataggcagtaggctagtatcttttttacgtagtaatcgtcgtagggagagaattctgacatcttgtagaacaacgatttaatcataggtagagatactttcagtctgtggtggatgatgtcattcacaacatccgccttgtatatgatgtttctgttttcaaacaccaagtcgaataccgtctttagtcggaaggttgatgtcgtatccgatgtatgaggcaacattgttgttacaattttgaaaggcggtattatagtattcgtctttctgaatgtcgaacctatctagtagataccgtagtatattgagagtgtatccttgattatgttttatgaatagataaagtagatgttgtccttcttccttttgttcgtgccaattgagtaacattatgagaatatgacctgttgcacaatcgttccatgatgggtgtacaatcaagattattacgtatcctcgtatcggctcctcgagataaaagagcatacaccacacgaggactatgtttggtatactgttgaaggtaagtgtgtaaccgcgttaatgtttgctccataatctattatcgcgtagatgaatcgcttctcggctcgcatcttagtgtgacttaacttgtaataattgcttttgtagaacgtggatatgtgtttacagtagtaatgaagagaagtgagtccatcctcgtcgacgcaattagggtcggatcctttgtacagaacgtaatagtttaagctcccattgaatttatatctaagataacacagcaatagatcggatgatttactaaagtcatcaatggtgtccgttagtatatcaaagatcttgttatcgattgatagtgaatgaatcagatagtggtgtagaggaatatgtcctttttcatccttgctatcaaagttacgcatgccgtggtgtaacaatatctttaatacagatggattaaatcgtgtattcatcgtatagcaatgtaatggagagttacctcgtttattcagatcgcagtgtttaataactagcttaaacagatgagacgatgtatccacatcaaagaacgtaaaatacatatgacaaacattgttgacagaaacgtgaccttcattcttaccgtcgtccataaatacgttaggtatgtaccacatactgtcgcgaacgatgcgtacaatctcgtccatctcataatgatttactttttcataattaaagatgtgaaagaaaaccgaacaatatatttttttagtaatgtttatgcgagacatataaaataaactccgtgtttatgatgccggtaaatgtttttatcatcttggacggaatcgattttgtaatatgtcatggaaacaaatgaaacaggacattatcgctccatgataaattatttaatggagtaataaagtatctccatgggtaatttcgaaatcaagttatcgtctgtattaatgttgtccactatggagtcgatcctctcattgttctttacagtttctgtaatgatggacgttagttcttttttgtaccatttgatgtcggattctttgcgtatctcaatctgtggcgtttgcttcgtttaaataatatatcaaacatggagacgcctgatatgtaggcattcttcattctattaatgtctactctatagcgctttagttccttatgacgaccggagatatcatacttactttagaaggaaaatcatcatctaggattaaggcgtatctgatacaggcgaataatggttcaggatatagatagcgtatatctctattaaatgcgtcaatcatagtctctagagtgggatggtagctaagtaataaatcaactatcctcgttttgttttctcttctgtaactacttttctggatggccgtattgattatcgagcgtgatgttgtaacactcgctccatattccaataaccgctttgcaaattgtatattattgacatcgaccgcgtaatatagtagagttttattctcattatcgatcatatctatattatccatgtacttgcttagtatatcaaatacatctattagtatggtttcataacagtgatacccgcaattattaaatctcgataatatcagaccgtacatacatagacggccattgttcgatacgtgatttacagccatgtgtccattattttccacgataaaccttacgacgtttacatcgacgagattattattaacaaagtagtcgtgcagaggatagttgttgtccgttatctaacatgcatcgaacgaccatatcgccgtaatgtaagtagtttatcaacatggcttgtacgatggattcatcctgttgtctaaatctctttagaatgttatcgatgatgtagtggttatagtctctggaatcgtaagaagtaatactacgcattacgtcgacaagagtatgacgtctctcaataagaagattaacgatttccatgtctacattatatggggttactctaaatcgcttgtttagataatccgcctctaatatagggctgacgtcgtatactctacacgtgtccacatcctttattaataatttaacaatctctatatctatggttgagcaagaccagtagtattggatgggtaaagatcctccttcgtctctgccatggatggaaacattgttattgatcaaacatttaattacatccttggatagagattgagattctctatgagacgatatatagtaatgaagagagttcttacacatatcactgtcgtacatacaggtacgaaatacgtaaccggtgctgtaacattctgatttaagaagccatagcaatacttctggtctcggattaggcgtcgttacgtatatatccaccaatccgagaccattgattgcataattcgtattcttggacggacgtatccgtttatccacaattaggtattttagcagacgtaagtcgatattatccgaagacatatacgaatacagatcgaaatcatttatattcgacttgagttcgttagaggaattcgaatagctggatatcagtagatgcacaatttgagattttacgtatctatgcttactgtatgctcctagcggagttaatccttcgttgtttctacaaagtctctcgactccgcgagagagtaacagtcgaacaatcttaatgtctgtatcgcatttattgaagacgtaacaatgtagcgcattgtttcctcgtctatctatatgttttgataagttgtgacacgtttcaatttctagttttatttttttgtacgtcacatcttcatccagtagacgacatagaatacatgtgcaatccatagctattctggtgctaattattcctatttcacgaaaaatgatgaaggcaatcattcctcataagatgataaaaagtgtagtgagagagcatgaaggagatttagtatttagcagtgcggatatgatccaagagggtgagatagtcgttctcgttcagaatctttcgcagcataagtagtatgtcgatatacttatcgttgaagactcttccagagacgatagctgattgagtacaaagtccaatgattgcacgaagttcttcggcggttttcatggagtcatttctgatgaaacatttaatgatctccacgcaattgtcgatattgtcccacggaagtgaatccttcaactcaccaccaaagagctccgttgcatcagttctgaaagagatgagaagcctgtagagagaccctgcgctttctctatgggtccatctatgagaaacccacaggatgtattcagtcagacaatgtctgacgtcggccacggtattcagggagtccttagtagcgtggcaatgacagggtctgaactgggcacaaggagaggccattgtaaaggtagacctgtagccgtttatgctaatagagggctttaatttccatttttttaatgggttgtggatgaggaatgagagtgatatcatattgagatacgtagttatgtagaggtgtatttcctatattatttactttcggtttcatattttaccaactctttaataaatttcttttcacgatgcatcttattaaatgacgttttctcataagtggacatatagatgcagaagtaatgaagaaaagtattacctctatcatctacataattagggtctgctcctttttttaacaacttatacagtacgtagtagtagtttatcggttttaaatcaagtctagaatatatagtggattaatatatttttatattagctaaagctatctatactatcagaaagcatatcattctcaacttcatcatgagttaaatatttgtgtaatggatgtcatgaacattaaacgtattcatgacatactcctttaataggttttttaaaacagatgattcaaatccttcattcattagataacagtgtaacggagtcgtaccttctactagtttgtttatatcacagcattctacaaacagtctaaacaatagagaagacggacagactttaacgtataaatgacacatgttatcgatattcgttgatgaattattattaaacgtagttatgataaatgattctaacgacatctctcgctagagataaaatctagtatcgtatcattaaacatctttgcatcatactcgcatagcatagtttttcataattaatacaatatttaaaagacttattcggaaagtattttaatacatgtatcatcgatggagatccatatgaggagtcacttgtagttcttcagtagtaataacagtgctatcatcgatagtataattatatgtagaaggttcatatgttgttgtaattggagtaactgttggtagttcttccgtggaatcaataattatactaacagcaatagtataattatataaatatgttccgttgatatcacatattttaatgaactcatttctaacaccctcagctatatctgtccaattaaatgtagccaacaatctactacgttctctttgattgactacttgtacggtagcgacgctacactatctttattgtcttctacatgctccaattgaatgtcatgatacaacgcagtttttcttatgcatgtttcataacaccacgaacatgtcgcagtaagatatatagccagagataatttctgtaaattcatgattgccggtcataaacaagcccgtcaataattgtggctatatattcagtttatagagcaaaataattaagcacaatagcgcttaatctcaaaatatgttatgtttatttttttcatattaaacatactggttaaaatcctctaaaggctgatcttcatctataaatcaagatcataattacatttagacagtggtttcatgtttataaaaatgttctttttgtgtgaataaggaatatactaatcaataatcaaccatcgaccccattacgatagtatgcaggcaaccccccattagagaggtacgtgtaatcagtctctccagttttagtatttttataagtcattgttacataaacggcttttaaacagtctcctcgataataagccatatctggaaatttattaaatactcgagtcattttacgcacggtcaaaaaagtaagtaatgtcgacgacttcttacattctatagaaacacctagaatactcattttcttttggaaaatatcctcagactctgatttgaacaatgcacgacctatagtaaaccgtgaccaataagttatattagtcaatggtatatccaaaccatcaggtgtggatagtacgccgatagtccagtctttggtatcgatagtgtagttattgaactgagaagttaccgtatagtctttttggtcatctctaaacaaggaaactaatacctctacactattgaacgatttatcttccgtaatgggtggaataacgggaatataaagtggactagcgatggatgaagtcacgaatataagacacgctattaatccgtatatcatcattttgatattacttataataacgatttgtttaatttttagtttatactattaattgtaaatgatattattatttttttaagtattatcagctttagtttatactattactatttgtaatatttagacatagataaacgtgataaaagtctatttgtttatatttattgcggatagcagtatttccctataaaaagtatacgtcctgtgttgtctttaatcatgtacatgaatggatggtttatgtagaccttcgtacgatataccatcgaaaagttagtcataaatactcctgtaacggccgatgcttctgtatactcctcattaacatctataaacgtcgtatgtagaaatttttctacagtgatagtttcattacacatcttgctaaaatctgcataatatccgaatatattagtaagtcctaaattttctaaaatcggtaccagattatacggttctgtcatttccactttaaactttggcatatacaagtctatacttttagtagataacataccacaccattttttaaatttttcatctgttatatttttttctatgttatatataccttctatgtcgtccggtagtataattaccatactagagtttccctcgtatggaatatcgataatagagaatcctccgaataattcattaatatgtacatattgcaagttattctcggtacccaccatcatatcaacactggtaactatattcttagaaatataaaacttgtctgtatatgtaagatgtttagaaaatggatatttccacattgctttaaaatggacggcgctaacaactgtcatacgagtattaatggatagcggactagtcaataaggaattaattttaccatttgtcatcgtcttaacccattcgttgattagttcctttgtttggttagcattattaaagtttacagtttgaaaatcgtcttttattttttgtaggaaggaggcgtggaactcgatactatcgctaccgtatattttatttgcggtagctagtgtcgcacaatacggaatatctacgtccatgtcattattgtcatccttcttatcatcgggtgtattctcattcatattctctatatattttgatagttgttcagctgtagaaccagctgctccatgatttagaatagataaagtagataaaatagaaactggagaaatcaaaacattttcatcagggtgttttaagattagttctttaaagatatccatggtatagaccaaacaataacgataacgatatatatcataaataaataatgttaaatttcagtttatgtttgtaccccgtattcatacttaacaaattggtattgcgtacacaatcaatcatattacataccattaataatgcaagcataaaaaatcgttagtagatgtttctaaatataggttccgtaagcaaagaatataagaatgaagcggtaatgataaaatcaatcgttatctaaaatgatcatactcatttattttattctattatattaacacatacatttttaacagcaacacattcaatattgtattgttatttttatattatttacacaattaacaatatattattagtttatattactgaattaataatataaaattcccaatcttgtcataaacacacactgagaaacagcataaacacaaaatccatcaaaaatgtcgatgaaatatctgatgttgttgttcgctgctatgataatcagatcattcgccgatagtggtaacgctatcgaaacgacattgccagaaattacaaacgctacaacagatattccagctatcagattatgcggtccagagggagatggatattgtttacacggtgactgtatccacgctagagatatcgacggtatgtattgtagatgctctcatggttatacaggcattagatgtcagcatgtagtattagtagactatcaacgttcagaaaaaccaaacactacaacgtcatatatcccatctcccggtattgtgcttgtattagtaggcattattattatgtgttgtctattatctgtttataggttcactcgaagaactaataaactacctctacaagatatggttgtgccataatttttataaatttttttatgagtatttttacaaaaaaaatgtataaagtgtatgtcttatgtatatttataaaaatgctaagtatgcgatgtatctatgttatttgtatttatctaaacaatacctctacctctagatattatacaaaaattttttatttcggcatattaaagtaaaatctagttaccttgaaaatgaatacagtgggtggttccgtatcaccagtaagaacataatagtcgaatacagtatccgattgagattttgcatacaatactagtctagaaagaaatttgtaatcattttctgtgacgggagtccatatatctgtatcatcgtctagtttatcagtgtcccatgctatatttctgttatcatcattagttaatgaaaataactctcgtgcttcagaaaagtcaaatattgtatccatacatacatctccaaaactatcgcttatacgtttatctttaacgatacctatacctagatggttatttactaacagacattttccagatctattgactataactcctatagtttccacatcaaccaagtaatgatcatctattgttatataacaataacataactcttttccatttttatcagtatgtatatctatatcaacgtcgtcgttgtagtgaatagtagtcattgatctattatatgaaacggatatgtctagaacggcaattgtcttacgtccagttaacactttcgttgatttaaagtctagagtctttgcaaacataatatccttatccgactttatatttcctgtagggtggtataattttattttgcctccacatatcggtgtttccaaatatattactagacaatattccatatagttattagttaagggtacccaattagaacacgtacgcttattatcatcatttggatcgtatttcataaaagttattgtactatcgatgtcaacacattctacattttttaatcgtctatatagtatttttctgatattttctataatatcagaattgtcttccatcggaagttgtatactatcggaatcagttacatgtttaaataattctctgatgtcattccttatacaatcaaattcattattaaacagtttaatagtctgtagacctttatcgtcgtaaatatccattgtcttattagttacgcttatttttatgtgttttacgttgctttattatattttataagaatgattgtttgacgaatcacgagaactattaagacacattattaggtatatattataaaaaagtttttgattacgatgttataagaggaaagaggacacattaacatcatacatcaattaactacattcttataacatcgtaatcaaaagaattgcaattttgatgtataacaactgtcaatgggttatggaattgtatattacatattatacggtatgttggtaacgacaaataccgatcggtaatcgtttgccggtgtaatagaattatatatatctatctattacaccggctgagtatacataataataagttgtggtagtatgatctccatatttataatttaggactttgtattcagtatttttggaatcataaaaaataaaaaaaagttttactaatttaaaatttaaaaagtatttacatttttttcactgtttagtcgcggatatggaattcgatcctgccaaaatcaatacatcatctatagatcatgtaacaatattacaatacatagatgaaccaaatgatataagactaacagtatgcattatccgaaatattaataacattacatattatatcaatatcacaaaaataaatacacatttggctaatcaatttcgggcttggaaaaaacgtatcgccggaagggactatatgactaacttatctagagatacaggaatacaacaatcaaaacttactgaaactatacgtaactgtcaaaaaaatagaaacatatatggtctatatatacactacaatttagttattaatgtggttattgattggataaccgatgtgattgttcaatcaatattaagagggttggtaaattggtacatagctaataatacctatactccaaatacacccaataatacaacaaccatttctgagttggatatcatcaaaatactaaataaatacgaggacgtgtatagagtaagtaaagaaaaagaatgtggaatttgctatgaagttgtttactcaaaacgattagaaaacgatagatactttggtttattggattcgtgtactcatatattttgcataacatgcatcaatatatggcataaaacacgaagagaaaccggtgcgtcggataattgtcctatatgtcgtacccgttttagaaacataacaatgagcaagttctataagctagttaactaataaataaaaagtttaatttgttgacgacgtatgtcgttattttttctcgtataaaagattaatttgattctaatataatctttagtattggataaatatcaattcaaattaattccattagattatatcataaataaaaatagtagcacgcactacttcagccaaatattcttttttgaaacgccatctatcgtagtgaggacacaagtgaacctataatgagcaaatttattagtatcggttacatgaaggactttacgtagagtggtgattccactatctgtggtacgaacggtttcatcttctttgatgccatcacccagatgttctataaacttggtatcctcgtccgatttcatatcctttgccaaccaatacatatagctaaactcaggcatatgttccacacatcctgaacaatgaaattctccagaagatgttacaatgtctagatttggacatttggtttcaaccgcgttaacatatgagtgaacacacccatacatgaaagcgatgagaaataggattttcatcttgccaaaatatcactagaaaaaatttatttatcaattttaaaggtataaaaaatacttattgttgctcgaatattttgtatttgatggtatacggaagattagaaatgtaggtattatcatcaactgattctatggttttatgtattctatcatgtttcactattgcgttggaaataatatcatatgcttccacatatattttattttgttttaactcataatactcacgtaattctggattattggcatatctgtgaataattttagctccatgatcagtaaatattaatgagaacatagtattaccacctaccattatttttttcatttcgttcaattcttgattgcaaagatctatataatcattatagcgttgacttatggactctggaatcttagacgatgtacagtcatctataatcatggcatatttaatacattgttttatagcatagtagttatctacgatgttagatatttctctcaatgaatcaatcacacaatctaatgtaggtttatgacataatagcattttcagcagttcaatgtttctagattcgttgatggcaatggctatacatgtatatccgttatttgatctaatgttgacatctgaaccggattctagcagtaaagatactagagattgtttattatatctaacagccttgtgaagaagtgtttctcctcgtttgtcaatcatgttaatgtctttaagataaggtaggcaaatgtttatagtactaagaattgggcaagcataagacatgtcacaaagaccctttttgtatgtataagtgtagaaattataacatccatagttggatttacataggtgtccaatcgggatctctccatcatcgagatgattgacggcatctcccccttccttttttagtagatatttcatcgtgtaagaatcaatattaatatttctaaagtatccgtgtatagcctctttatttaccacagctccatattccaacatgcattccactaaagggatatcgatatcgccgaatgtcatatactcaattagtatatgttggaggacatccgagttcattgttttcaatatcaaagagatggtttccttatcatttctccatagtggtacaatactacacattattccgtgaggctttccattctccaaaaacaatttgaccaaatctacatctttattgtatctataatcactatttagataatcagccataattcctcgagtgcaacatgttagatcgtctatatatgaataagccgtgttatctattcctttcattaacaatttaacgatgtctatatctatatgagatgacttaatataatattgaagagctgtacaatagtttttatctatagaagacggcttgattccgtgattaattagacatttaacaacttccggacgcacatatgctctcgtatccgactctgaatacagatgagagatgatatacagatgcaatacggtaccgcaatttcgtagttgataatcatcatacgcgtatccgtactcgtcctcataaagaacactgcagccattttctatgaacaaatcaataattttaggaacaggatcattgtcattacataattttctataactgaacgatggttttcacatttaacactcaagtcaaatccatgttctaccaacacctttatcaagtcaacgtctacatttttggatttcatatagctgaatatattaaagtcatttatgttgctaaatccagtggcttctagtagagccatcgctatatcctttaactttaacatgtctactatttgtgtattcttctaatggggtagctgtctccaatttttgcgtaatggattagtgccactgtctagtagtagtttgacgacctcgacattattacaatgctcattaaaaaggtatgcgtgtaaagcattattcttgaattggttcctggtatcattaggatctctgtctctcaacatctgtttaagttcatcgagagccacctcctcattttccaaatagtcaaacattttgactgaatagaagtgaatgagctactgtgaactctatacacccacacaactaatgtcattaaatattatttttttgaatgtatttataccatgtcaaaaacttgtacaattattaataaaaataatttagtgtttaaattttaccagttccagattttacacctccgttaaccccactttttacaccactggacgaccctcctccccacattccaccgccaccagatgtataagttttagatcctttattactaccatcatgtccatggataaagacactccacatgccgccactaccccctttagaagacatattaataagacttaagagttaaggacaagtttaacaataaaattaatcacgagtaccctactaccaacctacactattatatgattatagtttctatttttacagtaccttaactaaagtttctagtcacaagagcaatactaccaacctacactattatatgattatagtttctatttttataggaacgcgtacgagaaaatcaaatgtctaatttctaacggtagtgttgataaacgattatcgtcaatggatacctcctctatcatgtcgtctattttcttactttgttctattaacttattagcattatatattatttgattataaaacttatattgcttattagcccaatctgtaaatatcggattattaacatatcgtttctttgtaggtttatttaacttgtacatcactgtaagcatgtccgtaccatttattttaatttgacgcatatccgcaatttctttttcgcagtcggttataaattctatatatgatggatacatgctacatgtgtacttataatcgactaatatgaagtacttgatacatattttcagtaacgatttattattaccacctatgaataagtacctgtgatcgtctaggtaatcaactgttttcttaatacattcgatggttggtaatttactcagaataatttccaatatcttaatatataattctgctatttctggaatatatttatctgccagtataacacaaatagtaatacatgtaaacccatattttgttattatattaatgtctgcgccattatctattaaccattctactaggctgacactatgcgacttaatacaatgataaagtatactacatccatgtttatctattttgtttatatcatcaatatacggcttacaaagttttagtatcgataacacatccaactcacgcatagagaaggtagggaataatggcataatatttattaggttatcatcattgtcattatctacaactaagtttccattttttaaaatatactcgacaactttaggatctctattgccaaatttttgaaaatatttatttatatgcttaaatctatataatgtagctccttcatcaatcatacatttaataacattgatgtatactgtatgataagatacatattctaacaatagatcttgtatagaatctgtatatcttttaagaattgtggatattaggatattattacgtaaactattacacaattctaaaatataaaacgtatcacggtcgaataatagttgatcaactatataattatcgattttgtgatttttcttcctaaactgtttacgtaaatagttagatagaatattcattagttcatgaccactatagttactatcgaataacgcgtcaaatatttcccgtttaatatcgcatttgtcaagataataatagagtgtggtatgttcacgataagtataataacgcatctctttttcgtgtgaaattaaatagtttatcacgtccaaagatgtagcataaccatcttgtgacctagtaataatataataatagagaactgttttacccattctatcatcataatcagtggtgtagtcgtaatcgtaatcgtctaattcatcatcccaattataatattcaccagcacgtctaatctgttctattttgatcttgtatccatactgtatgttgctacatgtaggtattcctttatccaataatagtttaaacacatctacattgggatttgatgttgtagcgtatttctctacaatattaataccatttttgatactatttatttctatacctttcgaaattagtaatttcaataagtctatatcgatgttatcagaacatagatattcgaatatatcaaaatcattgatatttttatagtcgactgacgacaataacaaaatcacaacatcgtttttgatattattatttttcttggtaacgtatgcctttaatggagtttcaccatcatactcatataatggatttgcaccactttctatcaatgattgtgcactgctggcatcgatgttaaatgttttacaactatcatagagtatcttatcgttaaccatgattggttgttgatgctatcgcattttttggtttctttcatttcagttatgtatggatttagcacgtttgggaagcataagctcatatgatttcagtactgtagtgtcagtactattagtttcgatcagatcaatgtctagatctatagaatcaaaacacgataggtcagaagataatgaatatctgtaggcttcttgttgtactgtaacttctcgttttgttagatggttgcatcgtgctttaacatcaatggtacaaattttatcctcgctttgtgtatcatattcgtccctactataaaattgtatattcagattatcatgagatgtgtatacgctaacggtatcaataaacggagcacaccatttagtcataaccgtaatccaaaaatttttaaagtatatcttaacgaaagaagttgtgtcattgtctacggtgtatggtactagatcctcataagtgtatatatctagagtaatgtttaatttatcaaatggttgataatatggatcctcatggcaatttcctaagacgaaaataagacataaacacgcaataaatctaattgcggacatggttactccttaaaaaaatactaataatcaccttggctatttagtaagtgtcatttaacactatactcatattaatccatggactcataatctctatacgggattaacggatgttctatatacggggatgagtagttctcttctttaactttatactttttactaatcatatttagactgatgtatgggtaatagtgtttgaagagctcgttctcatcatcagaataaatcaatatctctgtttttttgttatacagatgtattacagcctcatatattacgtaatagaacgtgtcatctaccttattaactttcaccgcatagttgtttgcaaatacggttaatcctttgacctcgtcgatttccgaccaatctgggcgtataatgaatctaaactttaatttcttgtaatcattcgaaataatttttagtttgcatccgtagttatcccctttatgtaactgtaaatttctcaacgcgatatctccattaataatgatgtcgaattcgtgctgtatacccatactgaatggatgaacgaataccgacggcgttaatagtaatttactttttcatctttacatattgggtactagttttactatcataagtttataaattccacaagctactatggaataagccaaccatcttagtataacacacatgtcttaaagtttattaattaattacatgttgttttatatatcgctacgaatttaaacagagaaatcagtttaggaaaaaaaattatctatctacatcatcacgtctctgtattctacgatagagtgctactttaagatgagacatatccgtgtcatcaaaaatatactccattaaaatgattattccggcagcgaacttgatattggatatatcacaacctttgttaatatctacgacaatagacagcagtcccatggttccataaacagtgagtttatctttctttgaagagatattttgtagagatcttataaaactgtcgaatgacatcgcatttatatctttagctaaatcgtatatgttaccatcgtaatatctaaccgcgtctatcttaaacgtttccatcgctttaaagacgtttccgatagatggtctcatttcatcagtcatactgagccaacaaatataatcgtgtataacatctttgatagaatcagactctaaagaaaacgaatcggctttattatacgcattcatgataaacttaatgaaaaatgtttttcgttgtttaagttggatgaatagtatgtcttaataattgttattatttcattaattaatatttagtaacgagtacactctataaaaacgagaatgacataactaatcataactagttatcaaagtgtctaggacgcgtaattttcatatggtatagatcctgtaagcattgtctgtattctggagctattttctctatcgcattagtgagttcagaatatgttataaatttaaatcgaataacgaacataactttagtaaagtcgtctatattaactcttttattttctagccatcgtaataccatgtttaagatagtatattctctagttactacgatctcatcgttgtctagaatatcacatactgaatctacatccaattttagaaattggtctgtgttacatatctcttctatattattgttgatgtattgtcgtagaaaactattacgtagaccattttctttataaaacgaatatatagtactccaattatctttaccgatatatttgcacacataatccattctctcaatcactacatctttaagattttcgttgttaagatatttggctaaactatataattctattagatcatcaacagaatcagtatatatttttctagatccaaagacgaactctttggcgtcctctataatattcccagaaaagatattttcgtgttttagtttatcgagatctgatctgttcatatacgccatgattgtacggtacgttatgataaccgcataaaataaaaatccattttcatttttaaccaatactattcataattgagattgatgtaatactttgttactttgaacgtaaagacagtacacggatccgtatctccaacaagcacgtagtaatcaaatttggtgttgttaaacttcgcaatatttatcaatttagatagaaacttatactcatcatctgttttaggaatccatgtattattaccactttccaacttatcattatcccaggctatgtttcgtccatcatcgttgcgcagagtgaataattcttttgtattcggtagttcaaatatataatccatgcatagatcggtaaagctattgtagatgtgatttttcctaaatctaatataaaactcgtttactagcaaacactttcctgatttatcgaccaagacacatatggtttctaaatctatcaagtggtggggatccatagttatgacgcagtaacatagattattaccttcttaactgtcgctaatatctatatatttattgttatcgtattggattctgcatatagatggcttgtatgtcaaagatatagaacacataaccaatttatagtcgcgctttacattctcgaatctaaagttaagagatttagaaaacattatatcctcggatgatgttatcactgtttctggagtaggatatattaaagtctttacagatttcgtccgattcaaataaatcactaaataatatcccacattatcatctgttagagtagtatcattaaatctattatattttatgaaagatatatcactgctcacctctatatttcgtacatttttaaactgtttgtataatatctctctgatacaatcagatatatctattgtgtcggtagacgataccgttacatttgaattaatggtgttccattttacaacttttaacaagttgaccaattcatttctaatagtatcaaacgctccatgattaaatattttaatagtatccattttatatcactacggacacaaagtagctgacataaaccattgtataatttttatgttttatgtttattagcgtacacattttggaagttccggcttccatgtatttcctggagagcaagtagatgatgaggaaccagataggttatatccgtacttgcacttaaagtttacattgtcgttgtatgagtatgatcttttaaacccgctagacaagtatccgtttgatattgtaggatgtggacatttaacaatctgacacgtgggtggatcggaccattctcctcctgaacacaggacaccagagttaccaatcaacgaatatccactattgcaactataagttacaacgcttccatcggtataaaaatcctcgtatccgttatgtcttccgttggatatagatggaggggattggcatttaacagattcacaaataggtgcctcgggattccataccatagatccagtagatcctaattcacaatacgatttagattcaccgatcaaatgatatccgctattacaagagtacgttatactagagccaaagtctactccgccaatatcaagttggccattatcgatatctcgaggcgatgggcatctccgtttaatacattgattaaagagtgtccatccagtacctgtacatttagcatatataggtcccattttttgctttctgtatccaggtagacatagatattctatagtgtctcctatgttgtaattagcattagcatcagtctccacactattcttaaatttcatattaatgggtcgtgacggaatagtacagcatgatagaacgcatcctattcccaacaatgtcaggaacgtcacgctctccaccttcatatttatttatccgtaaaaatgttatcctggacatcgtacaaataataaaaagcccatatatgttcgctattgtagaaattgtttttcacagttgctcaaaaacgatggcagtgacttatgagttacgttacactttggagtctcatctttagtaaacatatcataatattcgatattacgagttgacatatcgaacaaattccaagtatttgattttggataatattcgtattttgcatctgctataattaagatataatcaccgcaagaacacacgaacatctttcctacatggttaaagtacatgtacaattctatccatttgtcttccttaactatatatttgtatagataattacgagtctcgtgagtaattccagtaattacatagatgtcgccgtcgtactctacagcataaactatactatgatgtctaggcatgggagacttttttatccaacgatttttagtgaaacattccacatcgtttaatactacatatttttcatacgtggtataaactccacccattacatatatatcatcgtttacgaataccgacgcgcctgaatatctaggagtaattaagtttggaagtcttatccatttcgaagtgccgtgtttcaaatattctgccacacccgttgaaatagaaaattctaatcctcctattacatataactttccattgttaacacaagtactaacttctgattttaacgacgacatattagtaaccgttttccattttttcgtttcaagatctacccgcgatacggaataaacatgtctattgttaatcatgccgccaataatgtatagacaattatgtaaaacatttgcattatagaattgtctatctgtattaccgactatcgtccaatattctgttctaggagagtaatgggttattgtggatatataatcagagtttttaatgactactatattatgttttataccatttcgtgtcactggctttgtagatttggatatagttaatcccaacaatgatatagcattgcgcatagtattagtcataaacttgggatgtaaaatgttgatgatatctacatcgtttggatttttatgtatccactttaataatatcatagctgtaacatcctcatgatttacgttaacgtcttcgtgggataagatagttgtcagttcatcctttgataattttccaaattctggatcggatgtcaccgcagtaatattgttgattatttctgacatcgacgcattatatagttttttaattccatatcttttagaaaagttaaacatccttatacaatttgtggaattaatattatgaatcatagtttttacacatagatctactacaggcggaacatcaattattatggcagcaactagtatcatttctacattgtttatggtgatgtttatcttcttccagcgcatatagtctaatagcgattcaaacgcgtgatagtttataccattcaatataatcgcttcatcctttagatggtgatcctgaatgcgtttaaaaaaattatacggagatgccgtaataatttccttattcacttgtataatttccccattgatagaaaatatcacgctttccattcttgaagtactataagtaattatagtataatgtaaaggtttatatattcaatattttttataaaaaaatcatttcgacattaattcctttttaaatttccgtctatcatctatagaaacatattctatgaatttataaaatgcttttacgtgtcctatcgtaggcgatagaaccgctaaaaagcctattgaatttctacaaaagaatctattatatggtatagggagagtataaaacattaaatgcccgtacttattaaagtattcagtagccaatcctaactctttcgaatacttattaatggctcttgttctgtacgaatctatttttttgaacaacggacctagtggtatatcttgttctatgtatctaaaataatgtctgactagatccgttagtttaatatcctcagtcatcttgtctagaatggcaaatctaactgcgggtttaggctttagtttagtttttatatctacatctatgtctttatctaacaccaaaaatataatagctaatattttattacaatcatccggatattcttctacgatctcactaactaatgtttctttggttatactagtatagtcactatcggacaaataaagaaaatcagatgatcgatgaataatacatttaaattcatcatctgtaagatttttgagatgtctcattaaaatattattagggtcagtactcattatcattaggcagctattacttattttattatttttcaccatatagatcaatcattagatcatcaaaatatgtttcaatcatcctaaagagtatggtgaatgactcttcccatctaatttctgaacgttcaccaatgtctctagccactttggcactaatagcgatcattcgcttagcgtcttctatattattaactggttgattcaatctatctagcaatggaccgtcggacagcgtcattctcatgttcttaatcaatgtacatacatcgccgtcatctaccaattcatccaacaacataagctttttaaaatcatcattataataggtttgatcgttgtcatttctccaaagaatatatctaataagtagagtcctcatgcttagtaatttaactattttagttaacaactattttttatgttaaatcaattagtacaccgctatgtttaatacttattcatattttagtttttaggattgagaatcaatacaaaaattaatgcatcattaattttagaaatacttagtttccacgtagttaatgaaacatttgaactcatcgtacaagacgttctcgtacaggacgtaactataaaccggtttatatttgttcaagatagatacaaatccgataactttttttacgaattctacgggatccactttaaaagtgtcataccgggttctttttatttttttaaacagatcaatggtgtgatgttgattaggtcttttacgaatttgatatagaatagcgtttacatattctccataatggtcaatcgccatttgttcgtatgtcataaattctttaattatatgacactgtgtattgtttagttcatccttgttcattgttaggaatctatccaaaatggcaattatactagaactataggtgcgttgtatacacatattgatgtgtctgtttatacaatccatgatatttggatccatgctactaccttcgggtaaaattgtagcatcatataccatttctagtactttaggttcattattatccattgcagaggacgtcatgatcgcatcctaaaaaaatatattatttttatgttattttgttaaaaataatcatcgaatacttcgtaagatactccttcatgaacataatcagttacaaaacgtttatatgaagtaaagtatctacgatttttacaaaagtccggatgcataagtacaaagtacgcgataaacggaataataatagatttatctagtctatctttttctatagctttcatagttagatacatggtctcagaagtaggattatgtaacatcagcttcgataaaatgactgggttatttagtcttacacattcgctcatacatgtatgaccgttaactacagagtctacactaaaatgattgaacaatagatagtctaccattgtttcgtattcagatagtacagcgtagtacatggcatcttcacaaattatatcattgtctaatagatatttgacgcatcttatggatcccacttcaacagccatcttaaaatcggtaaaatcatattgctttcctttatcattaataatttctaaaacatcatctctatcataaaagatacaaatattaactgtttgatccgtaataacattgctagtcgatagcaatttgttaataagatgcgctgggctcaatgtcttaataagaagtgtaagaggactatctccgaatttgttttgtttattaacatccgttgatggaagtaaaagatctataatgtctacattcttgactgttttagagcatacaatatggagaggtgtatttccatcatgatctggttttgagggactaattcctagtttcatcatccatgagattgtagaagcttttggattgtctgacataagatgtctatgaatatgatttttgccaaatttatccactatcctggcttcgaatccgatggacattatttttttaaacactctttctgaaggatctgtacacgccaacaacggaccacatccttcttcatcaaccgagttgttaatcttggctccatactgtaccaataaatttattctctctatgacttcatcatctgttcccgagagataatatagaggcgttttatgctgtttatcacacgcgtttggatctgcgccgtgcgtcagcagcatcgcgactattctattattattaattttagaagctatatgcaatggataatttccatcatcatccgtctcatttggagagtatcctctatgaagaagttcttcgacaaatcgttcatctagtcctttaattccacaatacgcatgtagaatgtgataattatttccagaaggttcgatagcttgtagcatattcctaaatacatctaaatttttactattatatttggcataaagagatagataatactcggccgacataatgttgtccattgtagtataaaaattaatatttctatttctatttctgtatatttgcaacaatttactctctataacaaatatcataacttagttcttttatgtcaagaaggcactggtttagttcatctataaatgtcacgccataactaccacgcatgctatactcagaattatgataaagatatttatccttggggtgtaggtaatggggattaatctttgttggatcagtctctaagttaacacatgtcacacatgatccatttatagttatatcacacgatgatgatttatgaattgattccggaagatcgctatcgtattttgtggttccacaattcatttccatacatgttattgtcacactaatattatgatgaactttatctagccgctgagtggtaaacaacagaacagatagtttattatctttaccaacaccctcagccgctgccacaaatctctgatccgtatccatgatggtcatgtttatttctagtccgtatccagtcaacactatgttagcatttctgtcgatatagctttcactcatatgacactcaccaataatagtagaattaatgtcgtaatttacaccaatagtgagttcggcggcaaagtaccaataccggtaatcttgtcgaggaggacatatagtattcttgtattctaccgaatacccgagagatgcgatacaaaagagcaagactaatttgtaaaccatcttactcaaaatatgtaacaatagtacgatgcaatgagtaagacaataggaaatctatcttatatacacataattattctatcaattttaccaattagttagtgtaatgttaacaaaaatgtgggagaatctaattagtttttctttacacaattgacgtacatgagtctgagttccttgtttttgctaattatttcatccaatttattattcttgactatatcgagatcttttgtataggagtcagacttgtattcaacatgcttttctataatcattttagctatttcggcatcatccaatagtacattttccagattagcagaatagatattaatgtcgtatttgaacagagcctgtaacatctcaatgtctttattatctatagccaatttaatgtccggaatgaagagaagggaattattggtgtttgtcgacgtcatatagtcgagcaagagaatcatcatatccacgtgtccattttttatagtggtgtgaatacaactaaggagaatagccagatcaaaagtagatggtatttctgaaagaaagtatgatacaatacttacatcattaagcatgacggcatgataaaatgaagttttccatccagttttcccatagaacatcagtctccaatttttcttaacaaacagttttaccgtttgcatgttaccactatcaaccgcataatacaatgcagtgtttcccttgtcatcaaattgtgaatcatccagtccactgaatagcaaaatctttactattttggtatcttccaatgtggctgcctgatgtaatggaaattcattctctagaagatttttcaatgctccagcgttcaacaacgtacatactagacgcacgttattatcagctattgcataatacaaggcactatgtccatggacatccgccttaaatgtatctttactagagagaaagcttttcagctgcttagacttccaagtattaattcgtgacagatccatgtctgaaacgagacgctaattagtgtatattttttcattttttataattttgtcatattgcaccagaattaataatatctctaatagatctgattagtagatacatggctatcgcaaaacaacatatacacatttaataaaaataatatttattaagaaaattcagatttcacgtacccatcaatataaataaaataatgattccttacaccgtacccatattaaggagattccaccttacccataaacaatataaatccagtaatatcatgtctaatgatgaacacaaatggtgtattaaattccagtttttcaggagatgatctcgccgtagctaccataatagtagatgcctctgctacagttccttgttcgtcgacatctatctttgcattctgaaacattttataaatatataatgggtccctagtcatatgtttaaacgacgcattatctggattaaacatactaggagccatcatttcggctatcgacttaatatccctcttattttcgatagaaaatttagggagtttaagattgtacactttattccctaattgaaacgaccaatagtctaattttgcagccgtaatagaatctgtgaaatgggtcatattatcacctattgccaggtacatactaatattagcatccttatacggaaggcgtaccatgtcatattctttgtcatcgattgtgattgtatttccttgcaatttagtaactacgttcatcatgggaaccgttttcgtaccgtacttattagtaaaactagcattgcgtgttttagtgatatcaaacggatattgccatgtacctttaaaatatatagtattaatgattgcccatagagtattattgtcgagcatattagaatctactacattagacataccggatctacgttctactatagaattaattttattaaccgcatctcgtctaaagtttaatctatataggccgaatctatgatattgttgataatacgacggtttaatacacacagtattatctacgaaactttgataagttagatcagtgtacgtatatttagatgttttcagcttagctaatcctgatattaattctgtaaatgctggacccagatctctttttctcaaatccatagtcttcaataattctattctagtattacctgatgcaggcaatagcgacataaacatagaaaacgaatagccaaacggcgagaagacaatattatcatcttgaatatttttatacgctactataccggcattggtaaatccttgcagacgataggtagacgctgaacacgttaacgatagtatcaataacgcaatcatgattttatggtattaataattaaccttatttttatgttcggtataaaaaaattattgatgtctacacatccttttgtaattgacatctatatatccttttgtataatcaactctaatcactttaacttttacagttttccctaccagtttatccctatattcaacatatctatccatatgcatcttaacactctctgccaagatagcttcagagtgaggatagtcaaaaagataaatatatagagcataatccttctcgtatactctgccctttattacatcgcccgcattgggcaacgaataacaaaatgcaagcatcttgttaacgggctcgtaaattgggataaaaattatgtttttatatctattttattcaagagaatattcaggaatttctttttccggttgtatctcgtcgcagtatatatcatttgtacattgtttcatattttttaatagtttacaccttttagtaggactagtatcgtacaattcatagctgtattttgaattccaatcacgcataaaaatatcttccaattgttgacgaagacctaatccatcatccggtgtaatattaatagatgctccacatgtatccgtaaagtaatttcctgtccaatttgaggtacctatataggccgttttatcggttaccatatatttggcatggtttaccctagaatacggaatgggaggatcagcatctggtacaataaatagctttacttctatatctatgtttttagattttagcatagcgatagatcttaaaaagtttctcatgataaacgaagatcgttgccagcaactaatcaatagcttaacggatacttgtctgtctatagcggatcttcttaattcatcttctatataaggccaaaacaaaattttacccgccttcgaataaataatagggataaagttcataacagatacataaacgaatttactcgcatttctaatacatgacaataaagcggttaaatcattggttctttccatagtacatagttgttgcggcgcagaagcaataaatacagagtgtggaacaccacttacgttaatactaagaggatgatctgtattataatacgacggataaaagtttttccaattatatggtagattgttaactccaagataccagtatacctcaaaaatttgagtgagatccgctgccaagttcctattattgaagatcgcaatacccaattctttgacctgagttagtgatctccaatccatgttagcgcttcctaaataaatatgtgtattatcagatatccaaaattttgtatgaagaactcctcctaggatatttgtaatatctatgtatcgtacttcaactccggccatttgtagtctttcaacatcctttaatggtttgttagatttattgacggctactctaactcttactcctcttttgggtaattgtacaatctcgtttaatattatcgtgccgaaattcgtacccacttcatccgataaactccaataaaaagatgatatatctagtgtttttgtggtattggatagaatttccctccacatgttaaatgtagacaaatatactttatcaaattgcatacctataggaatagtctctgtaatcactgcgattgtattatccggattcattttatttgttaaaaaataatcctatatcacttcactctattaaaaatccaagtttctatttctttcatgactgattttttaacttcatccgtttccttatgaagatgatgtttggcaccttcataaatttttatttctctattacaatttgcatgttgcatgaaataatatgcacctaaaacatcgctaatctcattgtttgttccctggagtatgagagtcgggggggtgttaatcttggaaattatttttctaaccttgttggtagccttcaagacctgactagcaaatccagccttaattttttcatgattgattaatgggtcgtattggtatttataaactttatccatatctctagatactgattctggacatagctttccgactggcgcatttggtgtgatggttcccataagtttggcagctagcagattcagttttgaaacagcatctgcattaactagaggagacattagaatcattgctgtaaacaagtttggattatcgtaagaggctagtatagaaattgttgctcccatggaatgacccaataagtagatttaatagttaccacgtgctgtaccaaagtcatcaatcatcattttttcaccattacttcttccatgtccaatatgatcatgtgagaatactaaaattcctaacgatgatatgttttcagctagttcgtcataacgtccagaatgtttaccagctccatgacttatgaatactaatgccttaggatatgtaataggtttccaatatttacaatatatgtaatcattgtccagattgaacatacagtttgcactcatgattcacgttatataactatcaatattaacagttcgtttgatgatcatattatttttatgttttattgataattgtaaaaacatacaattaaatcaatatagaggaaggagacggatactgtcttttgtgagatagtcatggcgactaaatcagattatgaggatgctgttttttactttgtggatgatgataaaatatgtagtcgcgactccatcatcgatctaatagatgaatatatcacgtggagaaatcatgttatagtgtttaacaaagatattaccagttgtggaagactgtacaaggaattgatgaagttcgatgatgccgctatacagtactatggtattgataaaattaatgagattgtcgaagctatgagcgaaggagaccactacatcaattttacaaaagtccatgatcaggaaagtttattcgctaccataggaatatgtgctaaaatcactgaacattggggatacaaaaagatttcagaatctagattccaatcattgggaaacattacagatctgatgaccgacgataatataaacatcttgatactttttctagaaaaaaaattgaattgatgatataggggtcttcataacgcataattattacgttagcattctatatccgtgttaaaaaaaattatcctatcatgtatttgagagttttatatgtagcaaacatgatagctgtgatgccaataagctttagatattcacgcgtgctagtgttagggatggtattatctggtggtgaaatgtccgttatataatctacaaaacaatcatcgcatatagtatgcgatagtagagtaaacatttttatcgtttctactgggttcatacatcgtctacccaattcggttatgaatgaaattgtcgccaatcttacacccaaacccttgttatccattagcatagtattaacttcgttatttatgtcataaactgtaaatgattctgtagatgccatatcatacatgatattcatgtccctattataatcattactaactttatcacaatatatgttgataatatctatatatgatctagtctttgtgggcaactgtctatacaagtcgtctaaacgttgtttactcatatagtatcgaacagccatcattacatggtcccgttccgttgatagataatcgagtatgttagtggacttgtcaaatctatataccatattttctggaagtggatatacatagtcgtgatcaacattattgctagcctcatcttctatatcctgtactataccattatctatatcatctacataatctacgatattattatacataaacatcgacaacatactattgtcaattatctaagtcctgttgatccaaacccttgatctcctctatctgtactatctagagattgtacttcttccagttctggataatatatacgttgatagattagctgggctattctatcccccgtatttacattaaacgtacattttccattattaataagaataactcctatgtttcccctataatcttcgtctattacaccgcctcctatatcaatgccttttagggacagaccagacctaggagctattctaccatagcagaacttaggcatggacatactaatatctgtcttaattaactgtcgttctccaggagggatagtataatcgtaagcgctatataaatcatatccggcggcgtaaggtgattgcctagtaggagatttagctctgttagtttccttaacaaatctaactggtgagttaatattcatgttgaacataaaactaatattttatttcaaaattatttaccatcccatatattccatgaataagtgtgatgattgtacacttctatagtatctatatacgattcacgataaaatcctcctatcaatagcagtttattatccactatgatcaattctggattatccctcggataaataggatcatctatcagagtccatgtattgctggattcacaataaaattccgcatttctaccaaccaagaataaccttctaccgaacactaacgcgcatgatttataatgaggataataagtggatggtccaaactgccactgatcatgattgggtagcaaatattctgtagttgtatcagtttcagaatgtcctcccattacgtatataacattgtttatagatgccactgctggattacatctaggtttcagaagactcggcatattaacccaagcagcatccccgtggaaccaacgctcaacagatgtgggatttggtagacctcctactacgtataatttattgttagcgggtatcccgctagcatacagtctggggctattcatcggaggaattggaatccaattgtttgatatataatttacagctatagcattgttatgtatttcattgttcatccatccaccgatgagatatactacttctccaacatgagtacttgtacacatatggaatatatctataatttgatccatgttcataggatactctatgaatggatacttgtatgatttgcgtggttgtttatcacaatgaaatattttggtacagtctagtatccattttacattatttatacctctgggagaaagataatttgacctgattacatttttgataaggagtagcagatttcctaatttatttcttcgctttatataccacttaatgacaaaatcaactacataatcctcatctggaacatttagttcatcgctttctagaataagtttcatagatagataatcaaaattgtctatgatgtcatcttccagttccaaaaagtgtttggcaataaagtttttagtatgacataagagattggatagtccgtattctatacccatcatgtaacactcgacacaatattcctttctaaaatctcgtaagataaagtttatacaagtgtagatgataaattctacagaggttaatatagaagcacgtaataaattgacgacgttatgactatctatatatacctttccagtatatgagtaaataactatagaagttaaactgtgaatgtcaaggtctagacaaacccttgtaactggatctttatttttcgtgtatttttgacgtaaatgtgtgcgaaagtaaggagataactttttcaatatcgtagaattgactattatattgccacctatagcatcaataattgttttgaatttcttagtcatagacaatgctaatatattcttacagtacacagtattaacaaatatcggcatttatgtttctttaaaagtcaacatctagagaaaaatgattatctttttgagacataactcccattttttggtattcacccacacgtttttcgaaaaaattagtttttccttccaatgatatattttccatgaaatcaaacggattggtaacattataaatttttttaaatcccaattcagaaatcaatctatccgcgacgaattctatatatgttttcatcatttcacaattcattcctataagtttaactggaagagccgcagtaagaaattcttgttcaatggatactgcatctgttataatagatctaacggtttcttcactcggtggatacaataaatgtttaaacatcaaacatgcgaagtcgcagtgtagaccctcgtctctactaattagttcgttggaaaacgtgagtccgggcattaggccacgctttttaagccaaaatatggaagcgaatgatccggaaaagaagattccttctactgcagcaaaggcaataagtctctctccataaccggcgctgtcatgtatccacttttgagcccaatcggccttcttttttacacaaggcattgtttctatggcattaaagagatagtttttttcattactatctttaacataagtatcgatcaaaagactatacatttccgaatgaatgttttcaatggccatctgaaatccgtagaaacatctagcctcggtaatctgtacttctgtacaaaatcgttccgccaaattttcattcactattccgtcactggctgcaaaaaacgccaatacatgttttataaaatatttttcgtctggtgttagtttattccaatcattgatatctttagatatatctacttcttccactgtccaaaatgatgcctctgcctttttatacatgttccagatgtcatgatattggattgggaaaataacaaatctatttggatttggtgcaaggatgggttccataactaaattaacaatatcaataaattttttttcagttatctatatgcctgtacttggattttttgtacatcgatatcgccgcaatcactacaataattacaagtattattgatagcattgttattagtactatcataattaaattatcgacattcatgggtgctgaataatcgttattatcatcattatcattttgtaattgtgacatcatactaaataaatcgtttgcgagattgttgtgggaagcgggcatggaggatgcattatcattattatttaacgccttccatttggattcacaaatatggcgcgcgttcaacattttatggaaactataattttgtgaaaacagataacaagaaaactcgtcatcgttcaaatttttaacgatagtaaaccgattaaacgtcgagctaatttctaacgctagcgactctgttggatatgggtttccagatatatatcttttcagttcccctacgtatctataatcatctgtaggaaatggaagatatttccatttatctactgttcctaatatcatatgtggtggtgtagtagaaccattaagcgcgaaagatgttatttcgcatcgtattttaacttcgcaataatttctggttagataacgcactctaccagtcaagtcaatgatattagcctttacagatatattcatagtagtcgtaacgatgactccatcttttagatgcgatactcctttgtatgtaccagaatcttcgtacctcaaactcgatatatttaaacaagttaatgagatattaacgcgttttatgaatgatgatatataaccagaagttttatcctcggtggctagcgctataaccttatcattataataccaactagtgtgattaatatgtgacacgtcagtgtgggtacaaatatgtacattatcgtctacgtcgtattcgatacatccgcatacagccaacaaatataaaatgacaaatactctaacgccgttcgtacccatcttgatgcggtttaataaatgttttgatttcaatttattgtaaaaaaagattcggttttatactgttcgatattctcattgcttatattctcatctatcatctccacacagtcaaatccgtggttagcatgcacctcatcaaccggtaaaagactatcggactcttctatcattataactctagaatatttaatttggtcattattaatcaagtcaattatcttatttttaacaaacgtgagtattttactcattttttataaaaacttttagaaatatacagactctatcgtgtgtctatatcttctttttatatccaatgtatttatgtctgatttttcttcatttatcatatataatggtccaaattctacacgtgcttcggattcatccagatcattaaggttcttataattgtaacatccttctcttccctcttctacatcttccttcttattcttattcttagcgtcacagaatctaccacagcaggatcccatgacgagcgtcatattaaactaatccattttcaattataatatatgattagtaatgaccattaaaataaaaaatattcttcataaccggcaagaaagtgaaaagttcacattgaaactatgtcagtagtatacatcatgaaatgatgatatatatatactctattttggtggaggattatatgatataattcgtggataatcattcttaagacacatttcttcattcgtaaatcttttcacgttaaatgagtgtccatattttgcaatttcttcatatgatggcggtgtacgtggacgaggctgctcctgttcttgttgtggtcgccgactgtcgtgtttgcgtttatccctccattatcgcgattgcgtagatggagtactattatataccttgtaattaaatttttttattaattaaacgtataaaaacgttccgtatctgtatttaagagccagatttcgtctaatagaacaaatagctacagtaaaaataactagaataattgctacacccactagaaaccacggatcgtaatacggcaatcggttttcgataataggtggaacgtatattttatttaaggacttaacaattgtctgtaaaccacaatttgcttccgcggatcctgtattaactatctgtaaaagcatatgttggccgggcggagccgaacattctccgatatccaatttctgtatatctataatattattaacctccgcatacgcattacagttcttttctagcttggataccgcactaggtacatcgtctagatctattcctatttcctcagcgatagctcttctatccttttccggaagcaatgaaatcacttcaataaatgattcaaccatgagtgtgaaactaagtcgagaattactcatgcatttgttagttattcggagcgcgcaatttttaaactgtcctataacctctcctatatgaatagcacaagtgacattagtagggatagaatgttgagctaatttttgtaaataactatctataaaaagattatacaaagttttaaactctttagtttccgccatttatccagtctgagaaaatgtctctcataataaatttttccaagaaactaattgggtgaagaatggaaacctttaatctatatttatcacagtctgttttggtacacatgatgaattcttctaatgccgtactaaattcgatatctttttcgatttctggatatgtttttaataaagtatgaacaaagaaatggaaatcgtaataccagttatgtttaactttgaaattgttttttattttcttgttaatgattccagccacttgggaaaagtcaaagtcgtttaatgccgatttaatacgttcattaaaaacaaactttttatcctttagatgaattattattggttcattggaatcaaaaagtaagatattatcgggtttaagatctgcgtgtaaaaagttgtcgcagcatggtagttcgtagattttaatgtataacagagccatctgtaaaaagataaactttatgtattgtaccaaagatttaaatcctaatttgatagctaactcggtatctactttatctgccgaatacagtgctaggggaaaaattataatgtttcctctttcgtattcgtagttagttctcttttcatgttcgaaaaagtgaaacatgcggttaaaatagtttataacattaatattactgttaataactgccgggtaaaagtgggatagtaatttcacgaatttgatactgtcctttctctcgttaaacgcctttagaaaaactttagaagaatatctcaatgatagttcctgaccatccatagtttgtatcaataatagcaacatatgaagaacacgtttatacagagtatgtaaaaatgttaatttatagtttaatcccatggcccacgcacacacgattaattttttttcatctccctttagattgttgtatagaaatttgggtactgtgaactccgccgtagtttccatgggactatataattttgtggcctcgaatacaaattttactacatagttatctatcttaaaaactataccatatcctcctgtagatatgtgataaaaatcgtcgtttataggataaaatcgtttatccttttgttggaaaaaggatgaattaatgtaatcattctcttctatctttagtagtgtttccttattaaaattcttaaaataatttaacaatctaactgacggagcccaattttggtgtaaatctaattgggacattatattgttaaaatacaaacagtctcctaatataacagtatctgataatctatggggagacatccattgatattcaggggatgaatcattggcaacacccatttattgtacaaaaagccccaatttacaaacgaaagtccaggtttgatagagacaaactattaactattttgtctctgtttttaacacctccacagtttttaatttctttagtaatgaaattattcacaatatcagtatcttctttatctaccagagattttactaacttgataaccttggctgtctcattcaatagggtagtaatatttgtatgtgtgatattgatatctttttgaattgtttcttttagaagtgattctttgatggtgccagcatacgaattacaataatgcagaaactcggttaacatgcaggaattatagtaagccaattccaattgttgcctgtgttgtattagagtgtcaatatgagcaatggtgtccttgcgtttctctgatagaatgcgagcagcgattttggcgttatcatttgacgatatttctggaatgacgaatcctgtttctactaactttttggtaggacaaagtgaaacaatcaagaagatagcttctcctcctatttgtggaagaaattgaactcctctagatgatctactgacgatagtatctccttgacagatattggaccgaattacagaagtacctggaatgtaaagccctgaaaccccctcattttttaagcagattgttgccgtaaatcctgcactgtgaccaagatagagagctcctttggtgaatccatctctatgtttcagtttaaccaagaaacagtcagctggtctaaaatttccatctctatctaatacagcatctaacttgatgtcaggaactatgaccggtttaatgttatatgtaacattgagtaaatccttaagttcataatcatcactgtcatcagttatgtacgatccaaacaatgtttctactggcatagtggatacgaagatgctatccatcagaatgtttccctgattagtattttctatatagctattcttctttaaacgattttccaaatcagtaactatgttcatttttttaggagtaggacgcctagccagtatggaagaggattttctagatcctctcttcaacatctttgatctcaatggaatgcaaaaccccatagtgaaacaaccaacgataaaaataatattgtttttcactttttataattttaccatctgactcatggattcattaatatctttataagagctactaacgtataattctttataactgaactgagatatatacaccggatctatggtttccataattgagtaaatgaatgctcggcaataactaatggcaaatgtataaaacaacgaaattatactagagttgttaaagttaatattttctatgagctgttccaataaattatttgttgtgactgcgttcaagtcataaatcatcttgatactatccagtaaacagtctttaagttctggaatattatcatcccattgtaaagcccctaattcgactatcgaatatcctgctctgatagcagtttcaatatcgacggacgtcaatactgtaataaaggtggtagtattgtcatcatcgtgataaactacgggaatatggtcgttagtaggtacggtgactttacacaacgcgatatataactttccttttgtaccatttttaacgtagttgggacgtcctgcagggtattgttttgaagaaatgatatcgagaacagatttgatacgatatttgttggattcctgattattcactataatataatctagacagatagatgattcgataaatagagaaggtatatcgttggtaggataatacatccccattccagtattctcggatactctattgatgacactagttaagaacatgtcttctattctagaaaacgaaaacatcctacatggactcattaaaacttctaacgctcctgattgtgtctcgaatgcctcgtacaaggatttcaaggatgccatagattctttgaccaacgatttagaattgcgtttagcatctgatttttttattaaatcgaatggtcggctctctggtttgctaccccaatgataacaatagtcttgtaaagataaaccgcaagaaaatttatacgcatccatccaaataaccctagcaccatcggatgatattaatgtattattatagattttccatccacaattattgggccagtatactgttagcaacggtatatcgaatagattactcatgtaacctactagaatgatagttcgtgtactagtcataatatctttaatccaatctaagaaatttaaaattagattttttacactgttaaagttaacaaaggtattacccggatacgtggatatcatatatggcattggtccattatcagtaatagctccataaactgatacggcgatggtttttatatgtgtttgatctaacgaggaagaaattcgcgcccacaattcatctctagatatgtatttaatatcaaacggtaacacatcaatttcgggacgcgtatatgtttctaaatttttaatccaaatataatgatgacctatatgccctattatcatactgtcaactatagtacacctagagaacttacgatacatctgtttcctataatcgttaaattttacaaatctataacatgctaaaccttttgacgacaaccattcattaatttctgatatggaatctgtattctcgataccgtattgttctaaagccagtgctatatctccctgttcgtgggaacgctttcgtataatatcgatcaacggataatctgaagtttttggagaataatatgactcatgatctatttcgtccataaacaatctagacataggaattggaggcgatgatcttaattttgtgcaatgagtcgtcaatcctataacttctaatattgtaatattcatcatcgacataacactatctatgttatcatcgtatattagtataccacggccttcttcatttcgtgccaaaataatatacagtcttaaataattacgcaatatctcaatagtttcataattgttagctgttttcatcaaggtttgtatcctgtttaacatgatggcgttctataacgtctctattttctatttttaattttttaaatttttaacgatttactgtggctagatacccaatctctctcaaatatttttttagcctcgcttacaagctgtttatctatactattaaaactgacgaatccgtgattttggtaatgggttccgtcgaaatttgccgaagtgatatgaacatattcgtcgtcgactatcaacaattttgtattattctgaatagtgaaaaccttcacagatagatcattttgaacacacaacgcgtctagacttctggcggttgccatagaatatacgtcgttcttatcccaattaccaactagaagtctgatcttaactcctctattaatggctgcttctataatggagttgtaaatgtcaggccaatagtagctattaccgtcgacacgtgtagtgggaactatggccaaatgttcaatatctatactagtcttagccgacttgagtttatcaataactacatcagtgtctagatctctagaatatcccaataggtgttctggagaatcagtaaagaacactccacctataggattcttaatatgatacgcagtgctaactggcagacaacaagccgcagagcataaattcaaccatgaattttttgcgctattaaaggctttaaaagtatcaaatcttctacgaagatctgtggccagcgggggataatcagaatatacacctaacgttttaatcgtatgtatagatcctccagtaaatgacgcgtttcctacataacatctttcatcatctgacacccaaaaacaaccgagtagtagtcccacattattttttttatctatattaacggttataaaatttatatccgggcagtgactttgtagctctcccagatttcttttccctcgttcatctagcaaaactattattttaatccctttttcagatgcctcttttagtttatcaaaaataagcgcgcccctagtcgtactcagaggattacaacaaaaagatgctatgtatatatatttcttagctagagtgataatttcgttaaaacattcaaatgttgttaaatgatcggatctaaaatccatattttctggtagtgtttctaccagcctacattttgctcccgcaggtaccggtgcaaatggccacatttagttaacataaaaacttatacatcctgttctatcaacgattctagaatatcatcggctatatcgctaaaattttcatcaaagtcgacatcacaacctaactcagtcaatatattaagaagttccatgatgtcatcttcgtttatttctatatccgtatccattgtagattgttgaccgattatcgagtttaaatcattactaatactcaatccttcagaatacaatctgtgtttcattgtaaatttataggcggtgtatttaagttggtagattttcaattatgtatcaatatagcaacagtagttcttgctcctccttgattctagcatcctcttcattattttcttctacgtacataagcatgtccaatacgttagacaacacaccgacgatggcggccgccacagacacgaatatgactagaccgatgaccatttaaaaacccctctctagctttcacttaaactgtatcgattattcttttagaacatgtataatataaaaacattattctatttcgaatttaggcttccaaaaatttttcatccgtaaaccgataataatatatatagacttgttaatagtcggaataaatagattaatgcttaaactatcatcatctccacgattagagatacaatatttacattctttttgctgtttcgaaactttatcaatacacgttaatacaaacccaggaaggagatattgaaactgaggctgttgaaaatgaaacggtgaatacaataattcagataatgtaaaatcatgattccgtattctgatgatattagaactgctaatggatgtcgatggtatgtatctaggagtatctattttaacaaagcatcgatttgctaatatacaattatcattttgattaattgttattttattcatattcttaaaaggtttcatatttatcaattcttctacattaaaaatttccatttttaatttatgtagccccgcaatactcctcattacgtttcattttttgtctataatatccattttgttcatctcggtacatagattatccaattgagaagcgcatttagtagttttgtacattttaagtttattgacgaatcgtcgaaaactagttatagttaacattttattatttgataccctgatattaatacccctgccgttactattatttataactgatgtaacccacgtaacattagaattaattatcgatagtaatgcatcgacgcttccaaaattgtctattataaactcaccgataatttttttattgcatgttttcatattcattaggattatcaaatctttaatcttattacgattgtatgcgttgatattacaagacgtcattctaaaagacggaggatctccatcaaatgccagacaatcacgtacaaagtacatggaaataggttttgttctattgcgcatcatagattcatatagaacacccatagaaatactaatttgttttactctataaaatactaatgcatctatttcatcgttttgtataacgtctttccaagtgccaaattccaaatttttttcattgatagtaccaaattcttctatctctttaactacttgcatagataggtaattacagtgatgcctacatgccgttttttgaaactgaatagatgcgtctagaagcgatgctacactagtcacaatcaccactttcatatttagaatatatgtatgtaaaaatatagtagaatttcattttgtttttttctatgctataaatgaattctcattttgcatctgctcatactccgttttatatcaataccaaagaaggaagatatctggttctaaaagccgttaaagtatgcgatgttagaactgtagaatgcgaaggaagtaaagcttcctgcgtactcaaagtagataaaccctcatcgcccgcgtgtgagagaagaccttcgtccccgtccagatgcgagagaatgaataaccctggaaaacaagtcccgtttatgaggacggacatgctacaaaatatgttcgcggctaatcgcgataatgtagcttctagacttttgtcctaaaatactattatatccttttcgatattaataaatccgtgtcgtccaggttttttatctctttcagtatgtgaatagataggtattttatctctattcatcatcgaatttaagagatccgataaacattgtttgtattctccagatgtcagcatctgatacaacaatatatgtgcacataaacctctggcacttatttcatgtaccttccccttatcactaaggagaatagtatttgagaaatatgtatacatgatattatcatgaattagatatacagaatttgtaacactctcgaaatcacacgatgtgtcggcgttaagatctaatatatcactcgataacacattttcatctagatacactagacattttttaaagctaaaatagtctttagtagtgacagtaactatgcgattattttcatcgatgatacatttcatcggcatattattacgcttaccatcaaagactataccatgtgtatatctaacgtattctagcatggttgccatacgtgcattaaacttttcaggatctttggatagatcttccaatctatctatttgagaaaacatttttatcatgttcaatagttgaaacgtcggatccactatatagatattatctataaagattttaggaactacgttcatggtatcctggcgaatattaaaactatcaatgatatgattatcgttttcatcttttatcaccatatagtttctaagatatgggattttacttaatataatattatttcccgtgataaattttattagaaaggccaaatctataagaaaagtcctagaattagtctgaagaatatctatatcgccgtaccgtatatttggattaattagatatagagaatatgatccgtaacatatacaacttttattatggcgtctaagatattcttccatcaacttattaacatttttgactagggaagatacattatgacgtcccattacttttgccttgtctattactgcgacgttcatagaatttagcatatctcttgccaattcttccattgatgttacattataagaaattttagatgaaattacatttggagctttaatagtaagaactcctaatatgtccgtgtatgtggtcactaatacagattgtagttctataatcgtaaataatttacctatattatatgtttgagtctgtttagaaaagtagctaagtatacgatcttttatttctgatgcagatgtatcaacatcggaaaaaaatctttttttattcttttttactaaagatacaaatatgtctttgttaaaaacagttattttctgaatatttctagcttgtaattttaacatatgatattcgttcacactaggtactctgcctaaataggtttctataatctttaatgtaatattaggaagagtattctgatcaggattcctattcattttgaggatttaaaactctgattattgtctaatatggtctcaacacaaactttttcacagagcgatagagtttttgataactcgtttttcttaagaaatataaaactactgtttccagagctcgctctatcttttattttatctaattcgatacaaactcctgatactggttcagaaagtaattcattaattttcagtcctttatagaagatatttaatatagataatacaaaattttcagttcttgatatcgatctgattgatcctagaactagatatattaataacgtgctcattaggcagtttatggcagcttgataattagatatagtatattccagttcatatttattagataccgcattgcccagattttgatattctatgaattcctctgaaaataaatccaaaataactagacattctattttttgtggattagtgtactctcttccctctatcatgttcactactggtgtccacgatgataaatatctagagggaatataatatagtccataggatgccaatctagcaatgtcgaataactgtaatttgattcttcgttcttcattatgaattgattcttgaggtataaacctaacacaaattatattattagacttttcgtatgtaatgtctttcatgttataagtttttaatcctggaatagaatctattttaatgaggcttttaaacgcagagttctccaacgagtcaaagcataatactctgttgtttttcttatatacgatgttacgattttcttctttgaatggaataggtttttgaattagtttataattacaacataatagataaggaagtgtgcaaatagtacgcggaaaaaacataatagctcccctgttttcatccatggttttaagtaaatgatcactggcttctttagtcaatggatattcgaacattaaccgtttcatcatcattggacagaatccatatttcttaatgtaaagagtgatcaaatcattgtgtttattgtaccatcttgttgtaaatgtgtattcggttatcggatctgctcctttttctattaaagtatcgatgtcgatctcgtctaagaattcaactatatcgacatatttcatttgtatacacataaccattactaacgtagaatgtataggaagagatgtaacgggaacagggtttgttgattcgcaaactattctaatacataattcttctgttaatacgtcttgcacgtaatctattatagatgccaagatatctatataattattttgtaagatgatgttaactatgtgatctatataagtagtgtaataattcatgtatttcgatatatgttccaactctgtctttgtgatgtctagtttcgtaatatctatagcatcctcaaaaaatatattcgcatatattcccaagtcttcagttctatcttctaaaaaatcttcaacgtatggaatataataatctattttacctcttctgatatcattaatgatatagtttttgacactatcttctgtcaattgattcttattcactatatctaagaaacggatagcgtccctaggacgaactactgccattaatatctctattatagcttctggacataattcatctattataccagaattaatgggaactattccgtatctatctaacatagttttaagaaagtcagaatctaagacctgatgttcatatattggttcatacatgaaatgatctctattgatgatagtgactatttcattctctgaaaattggtaactcattctatatatgctttccttgttgatgaaggatagaatatactcaatagaatttgtaccaacaaactgttctcttatgaatcgtatatcatcatctgaaataatcatgtaaggcatacatttaacaattagagacttgtctcctgttatcaatatactattcttgtgataatttatgtgtgaggcaaatttgtccacgttctttaattttgttatagtagatatcaaatccaatggagctacagttcttggcttaaacagatatagtttttctggaacgaattctacaacattattataaaggactttgggtagataagtgggatgaaatcctattttaattaatgcgatagccttgtcctcgtgcagatatccaaacgcttttgtgatagtatggcattcattgtctagaaacgctctacgaatatctgtgacagatatcatctttagagaatatactagtcgcgttaatagtactacaatttgtattttttaatctatctcaataaaaaaattaatatgtatgattcaatgtataactaaactactaactgttattgataactagaatcagaatctaatgatgacgtaaccaagaagtttatctactgccaatttagctgcattatttttagcatctcgtttagattttccatctgccttatcgaatactcttccgtcgatgtctacacaggcataaaatgtaggagagttactaggccccactgattcaatacgaaaagaccaatctctcctagtaatttggcagtactcattaataacggtgacagggttagcacctttccaatcaataatttttttagccggaataacatcatcaaaagacttatgatcctctctcattgatttttcgcgggatacatcatctattatggcgtcagccataacatcagcatccggcttatccgcctccgttgtcataaaccaacgaggaggaatatcgtcggagctgtacaccatagcactacgttgaagatcgtacagagctttattaacttctcgcttctccatattaagttgtctagttagttgtgcagcagtagctccttcgattccaatggttttaatagcctcacacacaatctctgcgttagaacgttcgtcgatatagattttagacatttttagagagaactaacacaaccagcaataaaactgaacctactttatcatttttttattcatcatcctctggtggttcgtcgttcctatcgaatgtggatctgattaacccgtcatctataggtgatgctggttctggagattctggaggagatggattattatctggaagaatctctgttatttccttgttttcatgtatcgattgcgttgtaacattaagattgcgaaatgctctaaatttgggaggcttaaagtgttgtttgcaatctctacacgcatgtctaactagtggaggttcgtcagcggctctagtttgaatcatcatcggcgtagtattcctacttttacagttaggacacggtgtattgtatttctcgtcgagaacgttaaaataatcgttgtaactcacatcctttattttatctatattgtattctactcctttcttaatgcattttataccgaataagagatagcgaaggaattctttttcggtgccgctagtacccttaatcatatcacatagtgttttatattccaaatttgtggcaatagacggtttatttctatacgatagtttgtttctggaatcctttgagtattctataccaatattattctttgattcgaatttagtttcttcgatattagattttgtattacctatattcttgatgtagtactttgatgatttttccatggcccattctattaagtcttccaagttggcatcatccacatattgtgatagtaattctcggatatcagtagcggctaccgccattgatgtttgttcattggatgagtaactactaatgtatacattttccatttataacacttatgtattaactttgttcatttatattttttcattattatgttgatattaacaaaagtgaatatatatgttaataattgtattgtggttatacggctacaatttcataatgagtggaagtcagtgtccgatgatcaatgacgatagctttactctgaaaagaaagtatcaaatcgatagtgcggagtcaacaataaaaatggataagaagaggataaagtttcagaatagagccaaaatggtaaaagaaataaatcagacaataagagcagcacaaactcattacgagacattgaaactaggatacataaaatttaagagaatgattaggactactactctagaagatatagcaccatctattccaaataatcagaaaacttataaactattctcggacatttcagccatcggcaaagcatcacagaatccgagtaagatggtatatgctctgctgctttacatgtttcccaatttgtttggagatgaccatagattcattcgttatagaatgcatccaatgagtaaaatcaaacacaagatcttctctcctttcaaacttaatcttattagaatattagtggaagaaagattctataataatgaatgcagatctaataaatggagaataattggaacacaagttgataaaatgttgatagctgaatctgataaatatacaatagatgcaaggtataacctaaaacccatgtatagaatcaagggaaaatctgaagaagataccctcttcatcaaacagatggtagaacaatgtgtgacatcccaggaattggtggaaaaagtgttgaagatactgtttagagatttgttcaagagtggagaatacaaagcatacagatacgatgatgatgtagaaaatggatttattggattggatacactaaaattaaacattgttcatgatatagttgaaccatgtatgcctgttcgtaggccagtggctaagatactgtgtaaagaaatggtaaataaatactttgagaatccgctacatattattggtaaaaatcttcaagagtgcattgactttgttagtgaataggcatttcatctttctccaatactaattcaaattgttaaattaataatggatagtataaatagttattagtgataaaatagtaaaaataattattagaataagagtgtagtatcatagataactctcttctataaaaatggattttattcgtagaaagtatcttatatacacagtagaaaataatatagattttttaaaggatgatacattaagtaaagtaaacaattttaccctcaatcatgtactagctctcaagtatctagttagcaattttcctcaacacgttattactaaggatgtattagctaataccaatttttttgttttcatacatatggtacgatgttgtaaagtgtacgaagcggttttacgacacgcatttgatgcacccacgttgtacgttaaagcattgactaagaattatttatcgtttagtaacgcaatacaatcgtacaaggaaaccgtgcataaactaacacaagatgaaaaatttttagaggttgccgaatacatggacgaattaggagaacttataggcgtaaattatgacttagttcttaatccattatttcacggaggggaacccatcaaagatatggaaatcatttttttaaaactgtttaagaaaacagacttcaaagttgttaaaaaattaagtgttataagattacttatttgggcatacctaagcaagaaagatacaggcatagagtttgcggataatgatagacaagatatatatactctatttcaacaaactggtagaatcgtccatagcaatctaacagaaacgtttagagattatatctttcccggagataagactagctattgggtgtggttaaacgaaagtatagctaatgatgcggatatcgttcttaatagacacgccattaccatgtatgataaaattcttagttatatatactctgagataaaacaaggacgcgttaataaaaacatgcttaagttagtttatatctttgagcctgaaaaagatatcagagaacttctgctagaaatcatatatgatattcctggagatatcctatctattattgatgcaaaaaacgacgattggaaaaaatattttattagtttttataaagctaattttattaacggtaatacatttattagtgatagaacgtttaacgaggacttattcagagttgttgttcaaatagatcccgaatatttcgataatgaacgaattatgtctttattctctacgagtgctgcggacattaaacgatttgatgagttagatattaataacagttatatatctaatataatttatgaggtgaacgatatcacattagatacaatggatgatatgaagaagtgtcaaatctttaacgaggatacgtcgtattatgttaaggaatacaatacatacctgtttttgcacgagtcggatcccatggtcatagagaacggaatactaaagaaactgtcatctataaaatccaagagtagacggctgaacttgtttagcaaaaacattttaaaatattatttagacggacaattggctcgtctaggtcttgtgttagatgattataaaggagacttgttagttaaaatgataaaccatcttaagtctgtggaggatgtatccgcattcgttcgattttctacagataaaaaccctagtattcttccatcgctaatcaaaactattttagctagttataatatttccatcatcgtcttatttcaaaggtttttgagagataatctatatcatgtagaagaattcttggataaaagcatccatctaaccaagacggataagaaatatatacttcaattgataagacacggtagatcatagaacagaccaaatatattattaataatttgtatatacatagatataattatcacatattaaaaattcacacatttttgataaatgggaactgctgcaacaattcagactcccaccaaattaatgaataaagaaaatgcagaaatgattttggaaaaaattgttgatcatatagttatgtatattagtgacgaatcaagtgattcagaaaataatcctgaatatattgattttcgtaacagatacgaagactatagatctctcattataaaaagtgatcacgagtttgtaaagctatgtaaaaatcatgcagagaaaagttctccagaaacgcaacaaatgattatcaaacacatatacgaacaatatcttattccagtatctgaagtactattaaaacctataatgtccatgggtgacataattacatataacggatgtaaagacaatgaatggatgctagaacaactctctaccctaaactttaacaatctccgcacatggaactcatgtagcataggcaatgtaacgcgtctgttttatacattttttagttatctgatgaaagataaactaaatatataagtataatcccattctaatactttaacctgatgtattacctgcatcttattagaatattaacctaactaaaagacataacataaaaactcattacatagttgataaaaagcggtaggatataaatattatggctgccaccgttccgcgttttgacgacgtgtacaaaaatgcacaaagaagaattctagatcaagaaacattttttagtagaggtctaagtagaccgttaatgaaaaacacatatctatttgataattacgcgtatggatggataccagaaactgcaatttggagtagtagatacgcaaacttagatgcaagtgactattatcccatttcgttgggattacttaaaaagttcgagtttctcatgtctctatataaaggtcctattccagtatacgaagaaaaagtaaatactgaattcatagccaatggatcgttctctggtagatacgtatcatatcttcgaaagttttctgctcttccaacaaacgagtttattagttttttgttactgacttccattccaatctataatatcttgttctggtttaaaaatactcagtttgatattactaaacacacattattcagatacgtctatacagataatgccaaacacctggcgttggctaggtatatgcatcaaacaggagactataagcctttgtttagtcgtctcaaagagaattatatatttaccggtcccgttccaataggtatcaaagatatagatcaccctaatcttagtagagcaagaagtccatccgattatgagacattagctaatattagtactatattgtactttaccaagtatgatccggtattaatgtttttattgttttacgtacctgggtattcaattactacaaaaattactccagccgtagaatatctaatggataaactgaatctaacaaagagcgacgtacaactgttgtaaattattttatgcttcgtaaaatgtaggttttgaaccaaacattctttcaaagaatgagatgcataaaactttattatccaatagattgactatttcggacgtcaatcgtttaaagtaaacttcgtaaaatattctttgatcactgccgagtttaaaacttctatcgataattgtctcatatgttttaatatttacaagttttttggtccatggtacattagccggacaaatatatgcaaaataatatcgttctccaagttctatagtttctggattatttttattatattcagtaaccaaatacatattagggttatctgcggatttataatttgagtgatgcattcgactcaacataaataattctagaggagacgatctactatcaaattcggatcgtaaatctgtttctaaagaacggagaatatctatacatacctgattagaattcatccgtccttcagacaacatctcagacagtctggttttgtacatcttaatcatattcttatgaaacttggaaacatctcttctagtttcactagtacctttattaattctctcaggtacagattttgaattcgacgatgccgagtatttcatcgttgtatatttcttcttcgattgcataatcagattcttatataccgcctcaaactctattttaaaattattaaacaatactctactattaatcagtcgttctaactctttcgctatttctatagacttatctacatcttgactgtctatctctgtaaacacggagtcggtatctccatacacgctacgaaaacgaaatctgtaatctataggcaacgatgttttcacaatcggattaatatctctatcgtccatataaaatggattacttaatggattggcaaaccgtaacataccgttagataactctgctccatttagtaccgattctagatacaagatcattctacgtcctatggatgtgcaactcttagccgaagcgtatgagtatagagcactatttctaaatcccatcagaccatatactgagttggctactatcttgtacgtatattgcatggaatcataaatggccttttcagttgaactggtagcctgttttaacatctttttatatctggctctctctgccaaaaatgttcttaatagtctaggaatggttccttctatcgatctatcgaaaattgctatttcagagatgaggttcggtagtctaggttcacaatgaaccgtaatatatctaggaggtggatatttctgaagcaatagctgattatttatttcttcttccaatctattggtactaacaacgacaccgactaatgtttccggagatagatttccaaagatacacacattaggatacagactgttataatcaaagattaatacattattactaaacattttttgttttggagcaaataccttaccgccttcataaggaaacttttgttttgtttctgatctaactaagatagttttagtttccaacaatagctttaacagtggacccttgatgactgtactcgctctatattcgaataccatggattgaggaagcacatatgttgacgcacccgcgtctgtttttgtttctactccataatactcccacaaatactgacacaaacaagcatcatgaatacagtatctagccatatctaaagctatgtttagattataatccttatacatctgagctaaatcaacgtcatcctttccgaaagataatttatatgtatcattaggtaaagtaggacataatagtacgactttaaatccattttcccaaatatctttacgaattactttacatataatatcctcatcaacagtcacataattacctgtggttaaaacctttgcaaatgcagcggctttgcctttcgcgtccgtagtatcgtcaccgatgaacgtcatttctctaactcctctatttaatactttacccatgcaactgaacgcgttcttggatatagaatccaatttgtacgaatccaatttttcagatttttgaatgaatgaatatagatcgaaaaatatagttccattattgttattaacgtgaaacgtagtattggccatgccgcctactcccttatgactagactgatttctctcataaatacagagatgtacagcttcctttttgtccggagatctaaagataatcttctctcctgttaataactctagacgattagtaatatatctcagatcaaagttatgtccgttaaaggtaacgacgtagtcgaacgttagttccaacaattgtttagctattcgtaacaaaactatttcagaacatagaactagttctcgttcgtaatccatttccattagtgactgtatcctcaaacatcctctatcgacggcttcttgtatttcctgttccgttaacatctcttcattaatgagcgtaaacaataatcgtttaccacttaaatcgatataacagtaacttgtatgcgagattgggttaataaatacagaaggaaacttcttatcgaagtgacactctatatctagaaataagtacgatcttgggatatcgaatctaggtatttttttagcgaaacagttacgtggatcgtcacaatgataacatccattgttaatctttgtcaaatattgctcgtccaacgagtaacatccgtctggagatatcccgttagaaatataaaaccaactaatattgagaaattcatccatggtggcattttgtatgctgcgtttctttggctcttctatcaaccacatatctgcgacggagcattttctatctttaatatctagattataacttattgtctcgtcaatgtctatagttctcatctttcccaacggcctcgcattaaatggaggaggagacaatgactgatatatttcgtccgtcactacgtaataaaagtaatgaggaaatcgtataaatacggtctcaccatttcgacatctggatttcagatataaaaatctgttttcaccgtgactttcaaaccaattaatgcaccgaacatccatttatagaatttagaaatatattttcatttaaatgaatcccaaacattggggaagagccgtatggaccattatttttatagtactttcgcaagcgggtttagacggcaacatagaagcgtgtaaacgaaaactatatactatagtcagcactcttccatgtcctgcatgtagacggcacgcgactatcgctatagaggacaataatgtcatgtctagcgatgatctgaattatatttattattttttcatcagattatttaacaatttggcatctgatcccaaatacgcgatcgatgtgacaaaggttaaccctttataaacttaacccattataaaacttatgattagtcacaactgaaataaccgcgtgattattttttggtataattctacacggcatggtttctgtaactatgaattcaacccccgttacattagtgaaatctttaacaaacagcaagggttcgtcaaagacataaaactcattgtttacaatcgaaatagaccccctatcacacttaaaataaaaaatatccttatcctttaccaccaaataaaattctgattggtcaatgtgaatgtattcacttaacagttccacaaatttatttattaactccgaggcacatacatcgtcggtattttttatggcaaactttactcttccagcatccgtttctaaaaaaatattaacgagttccatttatatcatccaatattattgaaatgacgttgatggacagatgatacaaataagaaggtacggtacctttgtccaccatctcctccaattcatgctctattttgtcattaactttaatgtatgaaaacagtacgccacatgcttccatgacagtgtgtaacactttggatacaaaatgtttgacattagtataattgttcaagactgtcaatctataatagatagtagctataatatattctatgatggtattgaagaagatgacaaccttggcatattgatcatttaacacagacatggtatcaacagatagcttgaatgaaagagaatcagtaattggaataagcgtcttctcgatagagtgtccgtataccaacatgtctgatattttgatgtattccattaaattatttagttttttctttttattttcgttaaacagcatttctgtcaacggaccccaacatcgttgaccgattaagttttgattgatttttccgtgtaatgcgtatctagtcagatcgtatagcctatccaataatccatcatctgtgcgtagatcacatcgtacactttttaattctctatagaagagcgacagacatctggagcaattacagacagcaatttctttattctctacagatgtaagatacttgaagacattcctatgatgatgcagaattttggataacacggtattgatggtatctgttaccataattcctttgatggctgatagtgtcagagcacaagatttccaatctttgacaatttttagcaccattatctttgttttgatatctatatcagacagcatggtgcgtctgacaacacagggattaagacggaaagatgaaatgattctctcaacatcttcaatggataccttgctattttttctggcattatctatatgtgcgagaatatcctctagagaatcagtatcctttttgatgatagtggatctcaatgacatgggacgtctaaaccttcttattttatcaccagattgcatggtgatttgtcttctttcttttatcataatgtaatctctaaattcatcggcaaattgtctatatctaaaatcataatatgagatgtttacctctacaaatatctgttcgtccaatgttagagtatctacatcagttttgtattccaaattaaacatggcaacggatttaattttatattcctctattaagtcctcgtcgataataacagaatgtagataatcatttaatccatcgtacatggttggaagatgcttgttgacaaaatctttaattgtcttgatgaaggtgggactatatctaacatcttgattaataaaatttataacattgtccataggatactttgtaactagttttatacacatctcttcatcggtaagtttagacagaatatcgtgaacaggtggtatattatattcatcagatatacgaagaacaatgtccaaatctatattgtttaatatattatatagatgtagcgtagctcctacaggaatatctttaactaagtcaatgatttcatcaaccgttagatctattttaaagttaatcatataggcattgatttttaaaaggtatgtagccttgactacattctcattaattaaccattccaagtcactgtgtgtaagaagattatattctatcataagcttgactacatttggtcccgataccattaaagaattcttatgatataaggaaacagcttttaggtactcatctactctacaagaattttggagagccttaacgatatcagtgacgtttattatttcaggaggaaaaaacctaacattgagaatgtcggagttaatagcttccagatacagtgattttggcaatagtccgtgtaatccataatccagtaacacgagctggtgcttgctagacaccttttcaatgtttaatttttttgaaataagctttgataaagccttcctcgcaaattccggatacatgaacatgtcggcgacatgattaagtattgttttttcattatttttatattttctcaacaagttctcaataccccaatagatgatagaatatcacccaatgcgtccatgttgtctatttccaacaggtcgctatatccaccaatagaagtttttccaaaaaagattctaggaacagttctaccaccagtaatttgttcaaaatagtcacgcaattcattttcgggtttaaattctttaatatcgacaatttcatacgctcctcttttgaaactaaacttatttagaatatccagtgcatttctacaaaaaggacatgtatacttgacaaaaattgtcactttgttattggccaacctttgttgtacaaattcctcggccattttaatatttaagtgatataaaactatctcgacttatttaactctttagtcgagatatatggacgcagatagctatatgatagccaactacagaaggcaaacgctataaaaaacataattacgacgagcatatttataaatatttttattcagcattacttgatatagtaatattaggcacagtcaaacattcaaccactctcgatacattaactctctcattttctttaacaaattctgcaatatcttcgtaaaaagattcttgaaactttttagaatatctatcgactctagatgaaatagcgttcgtcaacatactatgttttgtatacataaaggcgcccattttaacagtttctagtgacaaaatgctagcgatcctaggatcctttagaatcacatagattgacgattcgtctctcttagtaactctagtaaaataatcatacaatctagtacgcgaaataatattatccttgacttgaggagatctaaacaatctagttttgagaacatcgataagttcatcgggaatgacatacatactatctttaatagaactcttttcatccagttgaatggattcgtccttaaccaactgattaatgagatcttctattttatcattttccagatgatatgtatgtccattaaagttaaattgtgtagcgcttctttttagtctagcagccaatactttaacatcactaatatcgatatacaaaggagatgatttatctatggtattaagaattcgtttttcgacatctgtcaaaaccaattcctttttgcctgtatcatccagttttccatcctttgtaaagaaattattttctactagactattaataagactgataaggattcctccataattgcacaatccaaactttttaacaaaactagactttacaagatctacaggaatgcgtacttcaggtttcttagcttgtgattttttcttttgtggacattttcttgtgaccaactcatctaccatttcattgattttagcagtgaaataagctttcaatgcacgggcactgatactattgaaaacgagttgatcttcaaattccgccatttaagttcaccaaacaacttttaaatacaaatatatcaatagtagtagaataagaactataaaaaaaataataattaaccaataccaaccccaacaaccggtattattagttgatgtgactgttttctcatcacttagaacagatttaacaatttctataaagtctgtcaaatcatcttccggagaccccataaatacaccaaatatagcggcgtacaacttatccatttatacattgaatattggcttttctttatcgctatcttcatcatattcatcatcaatatcaacaagtcccagattacgagccagatcttcttctacattttcagtcattgatacacgttcactatctccagagagtccgataacgttagccaccacttctctatcaatgattagtttcttgagtgcgaatgtaatttttgtttccgttccggatctatagaaaactacaggtgtgataattgccttggccaattgtctttctcttttactgagtgattctagttcaccttctatagatctgagaatggatgattctccagtcgaaacatattctaccatggatccgtttaatttgttgatgaagatggattcatccttaaatgttttctctgtaatagtttccaccgaaagactatgcaaagaatttggaatgcgttccttgtgcttaatgtttccatagacggcttctagaagttgatacaacataggactagccgcggtaacttttatttttagaaagtatccatcgcttctatcttgtttagatttatttttataaagtttagtctctccttccaacataataaaagtggaagtcatttgactagataaactatcagtaagttttatagagatagacgaacaattagcgtattgagaagcatttagtgtaacgtattcgatacattttgcattagatttactaatcgattttgcatactctataacacccgcacaagtctgtagagaatcgctagatgcagtaggtcttggtgaagtttcaactctcttcttgattaccttactcatgattaaacctaaataattgtactttgtaatataatgatatatattttcactttatctcatttgagaataaaaatgtttttgtttaaccactgcatgatgtacagatttcggaatcgcaaaccaccagtggttttattttatccttgtccaatgtgaattgaatgggagcggatgcgggtttcgtacgtagatagtacattcccgtttttagaccgagactccatccgtaaaaatgcatactcgttagtttggaataactcggatctgctatatggatattcatagattgactttgatcgatgaaggctcccctgtctgcagccatttttatgatcgtcttttgtggaatttcccaaatagttttataaactcgcttaatatcttctggaaggtttgtattctgaatggatccaccatctgccataatcctattcttgatctcatcattccataattttctctcggttaaaactctaaggagatgcggattaactacttgaaattctccagacaatactctccgagtgtaaatattactggtatacggttccaccgactcattatttcccaaaatttgagcagttgatgcagtcggcataggtgccaccaataaactatttctaagaccgtatgttctgattttatcttttagaggttcccaattccaaagatccgacggtacaacattccaaagatcatattgtagaataccgttactggcgtacgatcctacatatgtatcgtatggtccttccttctcagctagttcacaactcgcctctaatgcaccgtaataaatggtttcgaagatcttcttatttagatcttgtgcttccaggctatcaaatggataatttaagagaataaacgcgtccgctaatccttgaacaccaataccgataggtctatgtctcttattagagatttcagcttctggaataggataataattaatatctataattttattgagatttctgacaattactttgaccacatccttcagtttgagaaaatcaaatcgcccatctattacaaacatgttcaaggcaacagatgccagattacaaacggctacctcattagcatccgcatattgtattatctcagtgcaaagattactacacttgatagttcctaaattttgttgattactctttttgttacacgcatccttataaagaatgaatggagtaccagtttcaatctgagattctataatcgctttccagacgactcgagcctttattatagatttgtatctcctttctctttcgtatagtgtatacaatcgttcgaactcgtctccccaaacattgtccaatccaggacattcatccggacacatcaacgaccactctccgtcatccttcactcgtttcataaagagatcaggaatccaaagagctataaatagatctctggttctatgttcctcgtttcctgtattctttttaagatcgaggaacgccataatatcagaatgccacggttccaagtatatggccataactccaggccgtttgtttcctccctgatctatgtatctagcggtgttattataaactctcaacattggaataataccgtttgatataccattggtaccggagatatagcttccactggcacgaatattactaattgatagacctattccccctgccattttagagattaatgcgcatcgttttaacgtgtcatagataccctctatgctatcatcgatcatgttaagtagaaaacagctagacatttggtgacgactagttcccgcattaaataaggtaggagaagcgtgcgtaaaccatttttcagaaagtagattgtacgtctcaatagctgagtctatatcccattgatgaattcctactgcgacacgcattaacatgtgctgaggtctttcaacgatcttgttgtttattttcaacaagtaggatttttccaaagttttaaaaccaaaatagttgtatgaaaagtctcgttcgtaaataataaccgagttgagtttatccttatatttgttaactatatccatggtgatacttgaaataatcggagaatgtttcccatttttaggattaacatagttgaataaatcctccatcacttcactaaatagtttttttgtttccttgtgtagatttgatacggctattctggcggctagaatggcataatccggatgttgtgtagtacaagtggctgctatttcggctgccagagtgtccaattctaccgttgttactccattatatattccttgaataaccttcatagctattttaataggatctatatgatccgtgtttaagccataacataattttctaatacgagacgtgattttatcaaacatgacattttccttgtatccatttcgtttaatgacaaacatttttgttggtgtaataaaaaaattatttaacttttcattaatagggatttgacgtatgtagcgtacaaaattatcgttcctggtatatagataaagagtcctatatatttgaaaatcgttacggctcgattaaactttaatgattgcatagtgaatatatcattaggatttaactccttgactatcagggcggcaccagaaattaccatcaaaagcattaatacagttatgccgatcgcagttagaacggttatagcatccaccatttatatctaaaaattagatcaaagaatatgtgacaaagtcctagttgtatactgagaattgacgaaacaatgtttcttacatatttttttcttattagtaactgacttaatagtaggaactggaaagctagacttgattattctataagtatagatacccttccaaataatattctctttgataaaagttccagaaaatgtagaattttttaaaaagttatcttttgctattaccaagattgtgtttagacgcttattattaatatgagtgatgaaatccacaccgcctctagatatcgcttttatttccacattagatggtaaatccaatagtgaaactatctttttaggaatgtatggactcgcgtttagaggagtgaacgtcttaggcgtcggaaaggatgattcatcaaacgaataaacaatttcacaaatggatgttaatgtattagtaggaaattttttgacgctagtggaattgaagattctaatggatgatgttctacctatttcatccgataacatgttaatttccgacaccaacggttttaatatttcgatgatatacggtagtctctctttcggacttatatagcttattccacaatacgagtcattatatactccaaaaaacaaaataactagtataaaatctgtatcgaatgggaaaaacgaaattatcgacataggtatagaatctggaacattgaacgtattaatacttaattctttttctgtggtaagtaccgataggttattgacattgtatggttttaaatattctataacttgagacttgatagatattagtgatgaattgaaaattatttttatcaccacgtgtgtttcaggatcatcgtcgacgcccgtcaaccaaccgaatggagtaaaataaatatcattaatatatgctctagatattagtatttttatcaatcctttgattatcatcttctcgtaggcgaatgattccatgatcaagagtgatttaagaacatcctccggagtattaatgggcttagtaaacagtccatcgttgcaataataaaagttatccaagttaaaggatattatgcattcgtttaaagatatcacctcatctgacggagacaattttttggtaggttttagagactttgaagctacttgtttaacaaagttattcatcgtcgtttactattctatttaattttgtagttaatttatcacatatcacattaattgactttttggtccatttttccatacgtttatattcttttaatcctgcgttatccgtttccgttatatccagggatagatcttgcaagttaaatagaatgctcttaaataatgtcatttttttatccgctaaaaatttaaagaatgtataaacttttttcaaagatttaaaacttttaggtggagttctagtacacaatatcataaacaaactaataaacatcccgcattcagattccaacagctgattaacttccacattaatacagcctattttcgctccaaatgtacattcgaaaaatctgaataaaacatcgatgtcacaatttgtattatccaatacagaatgtctgtgattcgtgttaaaaccatcggagaaggaatagaaataaaaattattatagtggtggaattcagttggaatattgcctccggagtcataaaaggatactaaacattgttttttatcataaattacacatttccaatgagacaaataacaaaatccaaacattacaaatctagaggtagaacttttaattttgtctttaagtatatacgataagatatgtttattcataaacgcgtcaaatttttcatgaatcgctaaggagtttaagaatctcatgtcaaattgtcctatataatccacttcggatccataagcaaactgagagactaagttcttaatacttcgattgctcatccaggctcctctctcaggctctattttcatcttgacgacctttggattttcaccagtatgtattcctttacgtgataaatcatcgattttcaaatccatttgtgagaagtctatcgccttagatactttttcccgtagtcgaggtttaaagaaatacgctaacggtatactagtaggtaactcaaagacatcatatatagaatggtaacgcgtctttaactcgtcggttaactctttcttttgatcgagttcgtcgctactattgggtctgctcaggtgccccgactctactagttccaacatcataccgataggaatacaagacactttgccagcggttgtagatttatcatatttctccactacatatccgttacaatttgttaaaaatttagatacatctatattgctacataatccagctagtgaatatatatgacataataaattggtaaatcctagttctggtattttactaattactaaatctgtatatctttccatttatcatggaaaagaatttaccagatatcttcttttttccaaactgcgttaatgtattctcttacaaatattcacaagatgaattcagtaatatgagtaaaacggaacgtgatagtttctcattggcggtgtttccagttataaaacatagatggcataacgcacacgttgtaaaacataaaggaatatacaaagttagtacagaagcacgtggaaaaaaagtatctcctccatcactaggaaaacccgcacacataaacctaaccgcgaagcaatatatatacagtgaacacacaataagctttgaatgttatagttttctaaaatgtataacaaatacagaaatcaattcgttcgatgagtatatattaagaggactattagaagctggtaatagtttacagatattttccaattccgtaggtaaacgaacagatactataggtgtactagggaataagtatccatttagcaaaattccattggcctcattaactcctaaagcacaacgagagatattttcagcgtggatttctcatagacctgtagttttaactggaggaactggagtgggtaagacgtcacaggtacccaagttattgctttggtttaattatttatttggtggattctctactctagataaaatcactgactttcacgaaagaccagtcattctatctcttcctaggatagctttagttagattgcatagcaataccattttaaaatcattgggatttaaggtactagatggatctcctatttctttacggtacggatctataccggaagaattaataaacaaacaaccaaaaaaatatggaattgtattttctacccataagttatctctaacaaaactatttagttatggcactcttattatagacgaagttcatgagcatgatcaaataggagatattattatagcagtagcgagaaagcatcatacgaaaatagattctatgtttttaatgactgccacgttagaggatgacagggaacggctaaaagtatttttacctaatcccgcatttatacatattcctggagatacactgtttaaaattagcgaggtatttattcataataagataaatccatcttccagaatggcatacatagaagaagaaaagagaaatttagttactgctatacagatgtatactcctcctgatggatcatccggtatagtctttgtggcatccgttgcacagtgtcacgaatataaatcatatttagaaaaaagattaccgtatgatatgtatattattcatggtaaggtcttagatatagacgaaatattagaaaaagtgtattcatcacctaatgtatcgataattatttctactccttatttggaatccagcgttactatacacaatgttacacacatttatgatatgggtagagtttttgtccccgctccttttggaggatcgcaacaatttatttctaaatctatgagagatcaacgaaaaggaagagtaggaagagttaatcctggtacatacgtctatttctatgatctgtcttatatgaagtctatacagcgaatagattcagaatttctacataattatatattgtacgctaataagtttaatctaacactccccgaagatttgtttataatccctacaaatttggatattctatggcgtacaaaggaatatatagactcgttcgatattagtacagaaacatggaataaattattatccaattattatatgaagatgatagagtatgctaaactttatgtactaagtcctattctcgctgaggagttggataactttgagaggacgggagaattaactagtattgtacgagaagccattttatctctaaatttacgaattaagattttaaattttaaacataaagatgatgatacgtatatacacttttgtaaaatattattcggtgtctataacggaacaaacgctactatatattatcatagacctctaacgggatatatgaatatgatttcagatactatatttgttcctgtagataataactaaaaatcaaactctaatgaccacatctttttttagagatgaaaaattttctacatctccttttgtagacacgactaaacattttgcagaaaaaagtttattagtgtttagataatcgtatacttcatcagtgtagatagtaaatgtgaacagataaaaggtattcttgctcaatagattggtaaattccatagaatatattaatcctttcttcttgagatcccacatcatttcaaccagagacgttttatccaatgatttacctcgtactataccacatacaaaactagattttgcagtgacgtcgtacctggtattcctaccaaacaaaattttacttttagttcttttagaaaattctaaggtagaatctctatttgccaatatgtcatctatggaattaccactagcaaaaaatgatagaaatatatattgatacatcgcagctggttttgatctactatactttaaaaacgaatcagattccataattgcctgtatatcatcagctgaaaaactatgttttacacgtattccttcggcatttctttttaatgatatatcttgtttagacaatgataaagttatcatgtccatgagagacgcgtctccgtatcgtataaatatttcattagatgttagacgcttcattaggggtatacttctataaggtttcttaatcagtccatcattggttgcgtcaagaactactatcggatgttgttgggtatctctagtgttacacatggccttactaaagtttgggtaaataactatgatatctctattaattatagatgcatatatttcattcgtcaaggatattagtatcgacttgctatcgtcattaatacgtgtaatgtaatcatataaatcatgcgatagccaaggaaaatttaaatagatgttcatcatataatcgtcgctataattcatattaatacgttgacattgactaatttgtaatatagcctcgccacgaagaaagctctcgtattcagtttcatcgataaaggataccgttaaatataactggttgccgatagtctcatagtctattaagtggtaagtttcgtacaaatacagaatccctaaaatattatctaatgttggattaatctttaccataactgtataaaatggagacggagtcataactattttaccgtttgtacttactggaatagatgaaggaataatctccggacatgctggtaaagacccaaatgtctgtttgaagaaatccaatgttccaggtcctaatctcttaacaaaaattacgatattcgatcccgatatcctttgcattctatttaccagcatatcacgaactatattaagattatctatcatgtctattctcccaccgttatataaatcgcctccgctaagaaacgttagtatatccatacaatggaatacttcatttctaaaatagtattcgttttctaattctttaatgtgaaatcgtatactagaaagggaaaaattatctttgagttttccgttagaaaagaaccacgaaactaatgttctgattgcgtccgattccgttgctgaattaatggatttacaccaaaaactcatataacttctagatgtagaagcattcgctaaaaaattagtagaatcaaaggatataagtagatgttccaacaagtgagcaattcccaagatttcatctatatcattctcgaatccgaaattagaaattcccaagtagatatcctttttcatccgatcgttgatgaaaatacgaactttattcggtaagacaatcatttactaaggagtaaaataggaagtaatgttcgtatgtcgttatcatcgtataaattaaaggtgtgttttttaccattaagtgacattataattttaccaatattggaattataatataggtgtatttgcgcactcgcgacggttgatgcatcggtaaatatagctgtatctaatgttctagtcggtatttcatcatttcgctgtctaataatagcgttttctctatctgtttccattacagctgcctgaagtttattggtcggataatatgtaaaataataagaaatacatacgaataacaaaaataaaataagatataataaagatgccatttagagatctaattttgttcaacttgtccaaattcctacttacagaagatgaggaatcgttggagatagtgtcttccttatgtagaggatttgaaatatcttatgatgacttgataacttactttccagataggaaataccataaatatatttataaagtatttgaacatgtagatttatcggaggaattaagtatggaattccatgatacaactttgcgagatttagtttatcttagattgtacaagtattccaagtgtatacggccgtgttataaattaggagataatctaaaaggcatagttgttataaaggacaggaatatttatattagggaagcaaatgatgacttgatagaatatctcctcaaggaatacactcctcagatttatacatattctaatgagcgcgtccccataactggttcaaaattaattctttgtggattttctcaagttacatttatggcgtatacaacgtcgcatataacaacaaataaaaaggtagatgttctcgtttccaaaaaatgtatagatgaactagtcgatccaataaattatcaaatacttcaaaatttatttgataaaggaagcggaacaataaacaaaatactcaggaagatattttattcggtaaccggtggccaaactccataggtagctttttctatttcggattttagaatttccaaattcaccagcgatttatcggttttggtgaaatccaaggatttattaatgtccacaaatgccatttgttttgtctgtggattgtatttgaaaatggaaacgatgtagttagatagatgcgctgcgaagtttcctattagggttccgcgcttcacgtcacccagcatacttgaatcaccatcctttaaaaaaaatgataagatatcaacatggagtatatcatactcggattttaattcttctactgcatcactgacattttcacaaatactacaatacggtttaccgaaaataatcagtacgttcttcatttatgggtatcaaaaacttaaaatcgttactgctggaaaataaatcactgacgatattagatgataatttatacaaagtatacaatggaatatttgtggatacaatgagtatttatatagccgtcgccaattgtgtcagaaacttagaagagttaactacggtattcataaaatacgtaaacggatgggtaaaaaagggagggcatgtaaccctttttatcgatagaggaagtataaaaattaaacaagacgttagagacaagagacgtaaatattctaaattaaccaaggacagaaaaatgctagaattagaaaagtgtacatccgaaatacaaaatgttaccggatttatggaagaagaaataaaggcaaaaatgcaattaaaaatcgataaacttacatttcaaatatatttatctgattctgataacataaaaatatcattgaatgagatactaacacatttcaacaataatgagaatgttacattattttattgtgatgaacgagacgcagaattcgttatgtgtctcgaggctaaaacacatttctctaccacaggagaatggccgttgataataagtaccgatcaggatactatgctatttgcatctactgataatcatcctaagatgataaaaaacttaactcaactgtttaaatttgttccctcggcagaggataactatttagcaaaattaacggcgttagtgaatggatgtgatttctttcctggactctatggggcatctataacacccaccaacttaaacaaaatacaattgtttagtgattttacaatcgataatatagtcactagtttggcaattaaaaattattatagaaagactaactctaccgtagacgtgcgtaatattgttacgtttataaacgattacgctaatttagacgatgtctactcgtatgttcctccttgtcaatgcactgttcaagaatttatattttccgcattagatgaaaaatggaatgaatttaaatcatcttatttagagaccgttccgttaccctgtcaattaatgtacgcgttagaaccacgtaaggagattgatgtttcagaagttaaaactttatcatcttatatagatttcgaaaatactaaatcagatatcgatgttataaaatctatatcctcgatttttggatattctaacgaaaactgtaacacgatagtattcggcatctataaggataatttactactgagtataaataattcattttactttaacgatagtctgttaataaccaatactaaaagtgataatataataaatataggttactagattaaaaatggtgttccaactcgtgtgctctacatgcggtaaagatatttctcacgaacgatataaattgattatacgaaaaaaatcattaaaggatgtactcgtcagtgtaaagaacgaatgttgtaggttaaaattatctacacaaatagaacctcaacgtaacttaacagtgcaacctctattggatataaactaatatggatccggttaattttatcaagacatatgcgcctagaggttctattatttttattaattataccatgtcattaacaagtcatttgaatccatcgatagaaaaacatgtgggtatttattatggtacgttattatcggaacacttggtagttgaatctacctatagaaaaggagttcgaatagtcccattggatagtttttttgaaggatatcttagtgcaaaagtatacatgttagagaatattcaagttatgaaaatagcagctgatacgtcattaactttattgggtattccgtatggatttggtcatgatagaatgtattgttttaaattggtagctgactgttataaaaatgccggtgttgaaacatcgtctaaacgaatattaggtaaagatatttttctgagccaaaacttcacagacgataatagatggataaagatatatgattctaataatttaacattttggcaaattgattaccttaaagggtgagttaatatgcataactactcctccgttgttttttccctcgttctttttcttaacgttgtttgccatcactctcataatgtaaagatattctaaaatggtaaacttttgcatatcggacgcagaaattggtataaatgttgtaattgtattatttcccgtcaatggactagtcacagctccatcagttttatatcctttagagtatttctcactcgtgtctaacattctagagcattccatgatctgtttatcgttgatattggccggaaagatagattttttattttttattatattactattggcaattgtagatataacttctggtaaatatttttctaccttttcaatctcttctattttcaagccggctatatattctgctatattgttgctagtatcaataccttttcttgctaagaagtcatatgtggtattcactatatcagttttaactggtagttccattagcctttccacttctgcagaataatcagaaattggttctttaccagaaaatccagctactataataggctcaccgatgatcattggcaaaatcctatattgtaccagattaatgagagcatatttcatttccaataattctgctagttcttgagacattgatttatttgatgaatctagttggttctctagatactctaccatttctgccgcatacaataacttgttagataaaatcagggttatcaaagtgtttagcgtggctagaatagtgggcttgcatgtattaaagaatgcggtagtatgagtaaaccgttttaacgaattatatagtctccagaaatctgtggcgttacatacatgagccgaatgacatcgaagattgtccaatatttttaatagctgctctttgtccattatttctatatttgactcgcaacaattgtagataccattaatcactgattcctttttcgatgccggacaatagcacaattgtttagctttggactctatgtattcagaattaatagatatatctcttaatacagattgcactatacattttgaaactatgtcaaaaattgtagaacgacgctgttctgcagccatttaactttaaataatttacaaaaatttaaaatgagcatccgtataaaaatcgataaactgcgccaaattgtggcatatttttcagagttcagtgaagaagtgtctataaatgtagactcgacggatgagttaatgtatatttttgccgccttgggcggatctgtaaacatttgggccattatacctctcagtgcatcagtgttctaccgcggagccgaaaatattgtgtttaatcttccggtgtccaaggtaaaatcgtgtttgtgtagttttcacaatgatgccatcatagatatagaacctgatctggaaaataatctagtaaaactttctagttatcatgtagtaagtgtcgattgtaacaaggaactgatgcctattaggacagatactactatttgtctaagtatagatcaaaagaaatcttacgtgtttaattttcacaagtatgaagaaaaatgttgtggtagaaccgtcattcatttagaatggttgttgggctttatcaagtgtattagtcagcatcagcatttggctattatgtttaaagatgacaatattattatgaagactcctggtaatactgatgcgttttccagggaatattctatgactgaatgttctcaagaactacaaaagttttctttcaaaatagctatctcgtctctcaacaaactacgaggattcaaaaagagagtcaatgtttttgaaactagaatcgtaatggataatgacgataacattctaggaatgttgttttcggatagagttcaatcctttaagatcaacatctttatggcgtttttagattaatactttcaatgagataaatatgggtggcggagtaagtgttgagctccctaaacgggatccgcctccgggagtacccactgatgagatgttattaaacgtggataaaatgcatgacgtgatagctcccgctaagcttttagaatatgtgcatataggaccactagcaaaagataaagaggataaagtaaagaaaagatatccagagtttagattagtcaacacaggacccggtggtctttcggcattgttaagacaatcgtataatggaaccgcacccaattgctgtcgcacttttaatcgtactcattattggaagaaggatggaaagatatcagataagtatgaagagggtgcagtattagaatcgtgttggccagacgttcacgacactggaaaatgcgatgttgatttattcgactggtgtcagggggatacgttcgatagaaacatatgccatcagtggatcggttcagcctttaataggagtgatagaactgtagagggtcaacaatcgttaataaatctgtataataagatgcaaacattatgtagtaaagatgctagtgtaccaatatgtgaatcatttttgcatcatttacgcgcacacaatacagaagatagcaaagagatgatcgattatattctaagacaacagtctgcggactttaaacagaaatatatgagatgtagttatcccactagagataagttagaagagtcattaaaatatgcggaacctcgagaatgttgggatccagagtgttcgaatgccaatgttaatttcttactaacacgtaattataataatttaggactttgcaatattgtacgatgtaatactagcgtgaacaacttacagatggataaaacttcctcattaagattgtcatgtggattaagcaatagtgatagattttctactgttcccgtcaatagagcaaaagtagttcaacataatattaaacattcgttcgacctaaaattgcatttgatcagtttattatctctcttggtaatatggatactaattgtagctatttaaatgggtgccgcggcaagcatacagacgacggtgaatacactcagcgaacgtatctcgtctaaattagaacaagaagcgaacgctagtgctcaaacaaaatgtgatatagaaatcggaaatttttatatccgacaaaaccatggatgtaacctcactgttaaaaatatgtgctctgcggacgcggatgctcagttggatgctgtgttatcagccgctacagaaacatatagtggattaacaccggaacaaaaagcatacgtgccagctatgtttactgctgcgttaaacattcagacaagtgtaaacactgttgttagagattttgaaaattatgtgaaacagacttgtaattctagcgcggtcgtcgataacaaattaaagatacaaaacgtaatcatagatgaatgttacggagccccaggatctccaacaaatttggaatttattaatacaggatctagcaaaggaaattgtgccattaaagcgttgatgcaattgacgactaaggccactactcaaatagcacctagacaagttgctggtacaggagttcagttttatatgattgttatcggtgttataatattggcagcgttgtttatgtactatgccaagcgtatgctgttcacatccaccaatgataaaatcaaacttattttagccaataaggaaaacgtccattggactacttacatggacacattctttagaacttctccgatggttattgctaccacggatatacaaaactgaaaatatattgataatattttaatagattaacatggaagttatcgctgatcgtctagacgatatagtgaaacaaaatatagcggatgaaaaatttgtagattttgttatacacggtctagagcatcaatgtcctgctatacttcgaccattaattaggttgtttattgatatactattatttgttatagtaatttatatttttacggtacgtctagtaagtagaaattatcaaatgttgttggtggcgctagtcatcacattaactattttttattactttatactataatagtactagactgacttctaacaaacatctcacctgccataaataaatgcttgatattaaagtcttctatttctaacactattccatctgtggaaaataatactctgacattatcgctaattgacacatcggtgagtgatatgcctataaagtaataatcttctttgggcacatataccagtgtaccaggttctaacaacctatttactggtgctcctgtagcatactttttctttaccttgagaatatccatcgtttgcttggtcaatagcgatatgtgattttttatcaaccactcgaaaaagtaattggagtgttcatatcctctacgggctattgtctcatggccgtgtatgaaatttaagtaacacgactgtggtagatttgttctatagagccggttgccgcaaatagatagaactaccaatatgtctgtacaaatgttaaacattaattgattaacagaaaaaacaatgttcgttctgggaatagaaaccagatcaaaacaaaattcgttagaatatatgccacgtttatacattgaatataaaataactacagtttgaaaaataacagtatcatttaaacatttaacttgcggggttaatctcacaactttactgtttttaaactgttcaaaatatagcatcgatccatgagaaatacgtttagccgcctttaatagaggaaatcccaccgcctttctggatctcaccaacgacgatagttctgaccagcaactcatttcttcatcatccacctgttttaacatataataggcaggagatagatatccgtcattgcaatattccttctcgtaggcacacaatctaatattgataaaatctccattctcttctctgcatttattatcttgtttcggtggctgattaggctgtagtcttggtttaggctttggtatatcgttgttgaatctattttggtcattaaatctttcatttcttcctggtatatttttatcacctcgtttggttggatttttgtctatattatcgtttgtaacatcggtacgggtattcatttatcacaaaaaaaacttctctaaatgagtctactgctagaaaacctcatcgaagaagataccatattttttgcaggaagtatatctgagtatgatgatttacaaatggttattgccggcgcaaaatccaaatttccaagatctatgctttctatttttaatatagtacctagaacgatgtcaaaatatgagttggagttgattcataacgaaaatatcacaggagcaatgtttaccacaatgtataatataagaaacaatttgggtctaggagatgataaactaactattgaagccattgaaaactatttcttggatcctaacaatgaagttatgcctcttattattaataatacggatatgactgccgtcattcctaaaaaaagtggtaggagaaagaataagaacatggttattttccgtcaaggatcatcacctatcttgtgtattttcgaaactcgtaaaaagattaatatttataaagaaaatatggaatccgcatcgactgagtatacacctatcggagacaacaaggctttgatatctaaatatgcgggaattaatatcctaaatgtgtattctccttccacatccataagattgaatgccatttacggattcaccaataaaaataaactagagaaacttagtactaataaggaactagaatcgtatagttctagccctcttcaagaacccattaggttaaatgattttctgggactattggaatgtgttaaaaagaatattcctctaacagatattccgacaaaggattgattactataaatggagaatgttcctaatgtatactttaatcctgtgtttatagagcccacgtttaaacattctttattaagtgtttataaacacagattaatagttttatttgaagtattcgttgtattcattctaatatatgtattttttagatctgaattaaatatgttcttcatgcctaaacgaaaaatacccgatcctattgatagattacgacgtgctaatctagcgtgtgaagacgataaattaatgatctatggattaccatggatgacaactcaaacatctgcgttatcaataaatagtaaaccgatagtgtataaagattgtgcaaagcttttgcgatcaataaatggatcacaaccagtatctcttaacgatgttcttcgcagatgatgattcattttttaagtatttggctagtcaagatgatgaatcttcattatctgatatattgcaaatcactcaatatctagactttctgttattattattgatccaatcaaaaaataaattagaagccgtgggtcattgttatgaatctctttcagaggaatacagacaattgacaaaattcacagactttcaagattttaaaaaactgtttaacaaggtccctattgttacagatggaagggtcaaacttaataaaggatatttgttcgactttgtgattagtttgatgcgattcaaaaaagaatcctctctagctaccaccgcaatagatcctattagatacatagatcctcgtcgcgatatcgcattttctaacgtgatggatatattaaagtcgaataaagtgaacaataattaattctttattgtcatcatgaacggcggacatattcagttgataatcggccccatgttttcaggtaaaagtacagaattaattagacgagttggtaccaaaaattgaaaaactagcgtctttttttgctcgactgcagaccatgggaagctctaagagtaaaccgaaagatcccagtcagagaggcgttcaggttgaaacgatatcaccgggtgatggccgcacgtttccaaaacgagggcaaacgtgcgtcgttcattacactggaatgctggaagacggaaaaaaagtagattcctcacgcgacaggaataagccgttcaagtttatgcttgggaagcaggaagtgatcagagggtgggaagagggagtagcgcaaatgtcagtaggccagagagcaaagcttactatatcacccgattatgcctatggggcgacagggcatccggggataattccccctcacgcaactctcgttttcgacgtcgagttgttgaaacttgagggagtgcaggtcgaaacgatctcccccggggatggacggacttttcctaagcggggccagacctgcgtagtccattacacaggcatgctcgaggacgggaaaaaagttgactcctcaagagaccgcaacaagcctttcaaatttatgctgggaaaacaagaagtaatcaggggctgggaagaaggcgtcgcgcagatgagtgtaggtcagcgagccaaacttacgatttcaccggattatgcctacggggcgaccggccacccggggattattcccccgcatgcaaccctcgtttttgatgtcgaacttctcaagctggagagtgggtctggagggggctcaatggacccatttcttgtcctcctgcactctgtatcatccagcctgagtagcagcgagctgacagagttgaagtttctttgcctcggcagggtgggtaagagaaagctcgaacgcgtacagtccggcttggacctcttcagtatgttgcttgagcagaacgatctcgagccaggacataccgagcttctgagagagctgttggccagtcttaggcggcacgatcttctccgcagagtagatgattttgaagccggtgcggctgccggtgcagcgcccggtgaagaagacctgtgtgccgcctgattaattaatttttatgagctcggaggtaatgatatgtatcaatcggtgtgtagaaagtgttacatcgactcataatattatattttttatctaaaaaactaaaaataaacattgattaaattttaatataatacttaaaaatggatgttgtgtcgttagataaaccgtttatgtattttgaggaaattgataatgagttagattacgaaccagaaagtgcaaatgaggtcgcaaaaaaactaccgtatcaaggacagttaaaactattactaggagaattattttttcttagtaagttacagcgacacggtatattagatggtgccaccgtagtgtatataggatcggctcctggtacacatatacgttatttgagagatcatttctataatttaggagtgatcatcaaatggatgctaattgacggccgccatcatgatcctattttaaatggattgcgtgatgtgactctagtgactcggttcgttgatgaggaatatctacgatccatcaaaaaacaactgcatccttctaagattattttaatttctgatgtaagatccaaacgaggaggaaatgaacctagtacggcggatttactaagtaattacgctctacaaaatgtcatgattagtattttaaaccccgtggcatctagtcttaaatggagatgcccgtttccagatcaatggatcaaggacttttatatcccacacggtaataaaatgttacaaccttttgctccttcatattcagctgaaatgagattattaagtatttataccggtgagaacatgagactgactcgagttaccaaattagacgctgtaaattatgaaaaaaagatgtactaccttaataagatcgtccgtaacaaagtagttgttaactttgattatcctaatcaggaatatgactattttcacatgtactttatgctgaggaccgtgtactgcaataaaacatttcctactactaaagcaaaggtactatttctacaacaatctatatttcgtttcttaaatattccaacaacatcaactgaaaaagttagtcatgaaccaatacaacgtaaaatatctagcaaaaattctatgtctaaaaacagaaatagcaagagatccgtacgcggtaataaatagaaacgtgctactgagatatactaccgatatagagtataatgatttagttactttaataaccgttagacataaaattgattctatgaaaactgtgtttcaggtatttaacgaatcatccataaattatactccggttgatgatgattatggagaaccaatcattataacatcgtatcttcaaaaaggtcataacaagtttcctgtaaattttctatacatagatgtggtaatatctgacttatttcctagctttgttagactagatactacagaaactaatatagttaatagtgtactacaaacaggcgatggtaaaaagactcttcgtcttcccaaaatgttagagacggaaatagttgtcaagattctctatcgccctaatataccattaaaaattgttagatttttccgcaataacatggtaactggagtagagatagccgatagatctgttatttcagtcgctgattaatcaattagtagagatgagataagaacattataataatcaataatattatcttatatctcgtttagaaaaatgctaatattaaaatagctaacgctagtaatccaatcggaagccatttgatatctataatagggtatctaatttcctgattcagatagcggacagctatattctcggtagctactcgtttggaatcacaaacattatttacatctaatttactatctgtaatggaaacgtttcccaatgaaatggtacaatccgatacattgcattttgttatatttttttttaaagaggctggtaacaacgcatcgcttcgtttacatggctcgtaccaacaataatagggtaatcttgtatctattcctatccgtactatgcttttatcaggataaatacatttacatcgtatatcgtctttgttagcatcacagaatgcataaatttgttcgtccgtcatgataaaaatttaaagtgtaaatataactattatttttatagttgtaataaaaagggaaatttgattgtatactttcggttctttaaaagaaactgacttgataaaaatggctgtaatctctaaggttacgtatagtctatatgatcaaaaagagattaatgctacagatattatcattagtcatgttaaaaatgacgacgatatcggtaccgttaaagatggtagactaggtgctatggatggggcattatgtaaaacttgtgggaaaacggaattggaatgtttcggtcactggggtaaagtaagtatttataaaactcatatagttaagcctgaatttatttcagaaattattcgtttactgaatcatatatgtattcactgcggattattgcgttcacgagaaccgtattccgacgatattaacctaaaagagttatcgggacacgctcttaggagattaaaggataaaatattatccaagaaaaagtcatgttggaacagcgaatgtatgcaaccgtatcaaaaaattactttttcaaagaaaaaggtttgtttcgtcaacaagttggatgatattaacgttcctaattctctcatctatcaaaagttaatttctattcatgaaaagttttggccattattagaaattcatcaatatccagctaacttattttatacagactactttcccatccctccgctgattattagaccggctattagtttttggatagatagtatacccaaagagaccaatgaattaacttacttattaggtatgatcgttaagaattgtaacttgaatgctgatgaacaggttatccagaaggcggtaatagaatacgatgatattaaaattatttctaataacactaccagtatcaatttatcatatattacatccggcaaaaataatatgattagaagttatatcgtcgcccgacgaaaagatcagaccgctagatctgtaattggtcccagtacatctatcaccgttaatgaggtaggaatgcccgcatatattagaaatacacttacagaaaagatatttgttaatgcctttacagtggataaagttaaacaactattagcgtcaaaccaagttaaattttactttaataaacgattaaaccaattaacaagaatacgccaaggaaagtttatcaaaaataaaatacatttattgcctggtgattgggtagaagtagctgttcaagaatatacaagtattatttttggaagacagccgtctctacatagatacaacgtcatcgcttcatctatcagagctaccgaaggagatactatcaaaatatctcccggaattgccaactctcaaaatgctgatttcgacggagatgaagaatggatgatattggagcaaaatcctaaagccgtaattgaacaaagtattcttatgtatccgacgacgttactcaaacacgatattcatggagcccccgtttatggatctattcaagatgaaatcgtagcagcgtattcattgtttaggatacaagatctttgtttagatgaagtattgaacatcttggggaaatatggaagagagttcgatcctaaaggtaaatgtaaattcagcggtaaagatatctatacttacttgataggtgaaaagattaattatccgggtctcttaaaggatggtgaaattattgcaaacgacgtagatagtaattttgttgtggctatgaggcatctgtcattggctggactcttatccgatcataagtcgaacgtggaaggtatcaactttattatcaagtcatcttatgtttttaagagatatctatctatttacggttttggggtgacattcaaagatctgagaccaaattcgacgttcactaataaattggaggccatcaacgtagaaaaaatagaacttatcaaagaagcatacgccaaatatctcaacgatgtaagagacgggaaaatagttccattatctaaagctttagaggcggactatgtggaatccatgttatccaacttgacaaatcttaatatccgagagatagaagaacatatgagacaaacgctgatagatgatccagataataacctcctgaaaatggccaaagcgggttataaagtaaatcctacagaactaatgtatattctaggtacgtatggacaacaaaggattgatggtgaaccagcagagactcgagtattgggtagagtcttaccttactatcttccagactctaaggatccagaaggaagaggttacattcttaattctttaacaaaaggattaacgggttctcaatattacttttcgatgctggttgccagatctcaatctactgatatcgtctgtgaaacatcacgtaccggaacactggctagaaaaatcattaaaaagatggaggatatggtggtcgacggatacggacaagtagttataggtaatacgctcatcaagtacgccgccaattataccaaaattctaggctcagtatgtaaacctgtagatcttatctatccagatgagtccatgacttggtatttggaaattagtgctctgtggaataaaataaaacagggattcgtttactctcagaaacagaaacttgcaaagaagacattggcgccgtttaatttcctagtattcgtcaaacccaccactgaggataatgctattaaggttaaggatctgtacgatatgattcataacgtcattgatgatgtgagagagaaatacttctttacggtatctaatatagattttatggagtatatattcttgacgcatcttaatccttctagaattagaattacaaaagaaacggctatcactatctttgaaaagttctatgaaaaactcaattatactctaggtggtggaactcctattggaattatttctgcacaggtattgtctgagaagtttacacaacaagccctgtccagttttcacactactgaaaaaagtggtgccgtcaaacaaaaacttggtttcaacgagtttaataacttgactaatttgagtaagaataagaccgaaattatcactctggtatccgatgatatctctaaacttcaatctgttaagattaatttcgaatttgtatgtttgggagaattaaatccagacatcactcttcgaaaagaaacagataaatatgtagtagatataatagttaatagattatacatcaagagagcagaaataaccgaattagttgtcgaatatatgattgaacgatttatctcctttagcgtcattgtaaaggaatggggtatggagacattcattgaggacgaggataatattagatttactgtctacctaaatttcgttgaaccggaagaattgaatcttagtaagtttatgatggttcttccgggtgccgccaacaagggcaagattagtaaattcaagattcctatctctgattatacgggttatgacgacttcaatcaaacaaaaaagctcaataagatgactgtagaactcatgaatctaaaagaattgggttctttcgatttggaaaacgtcaacgtgtatcctggagtatggaatacatacgatatcttcggtatcgaggccgctcgtgaatacttgtgcgaagccatgttaaacacctatggagaagggttcgattatctgtatcagccttgtgatcttctcgctagtttactatgtgctagttacgaaccagaatcagttaataaattcaagttcggtgcagctagtactcttaagagagctacgttcggagacaataaagcattgttaaacgcggctcttcataaaaagtcagaacctattaacgataatagtagctgccacttttttagcaaggtccctaatataggaactggatattacaaatactttatcgacttgggtcttctcatgagaatggaaaggaaactatctgataagatatcttctcaaaagatcaaggaaatggaagaaacagaagacttttaattcttatcaataacatatttttctatgatctgtcttttaaacgatggattttccacaaatgcgcctctcaagtccctcatagaatgatacacgtataaaaaatatagcataggcaatgactccttatttttagacattagatatgccaaaatcatagccccgcttctatttactcccgcagcacaatgaaccaacacgggctcgtttcgttgatcacatttagataaaaaggcggttacgtcgtcaaaatatttactaatatcggtagttgtatcatctaccaacggtatatgaataatattaatattagagttaggtaatgtatatttatccatcgtcaaatttaaaacatatttgaacttaacttcagatgatggtgcatccatagcatttttataatttcccaaatacacattattggttacccttgtcattatagtgggagatttggctttgtgcatatctccagttgaacgtagtagtaagtatttatacaaacttttcttatccatttataacgtacaaatggataaaactactttatcggtaaacgcgtgtaatttagaatacgttagagaaaaggctatagtaggcgtacaagcagccaaaacatcaacacttatattctttgttattatattggcaattagtgcgctattactctggtttcagacgtctgataatccagtctttaatgaattaacgagatatatgcgaattaaaaatacggttaacgattggaaatcattaacggatagcaaaacaaaattagaaagtgatagaggtagacttctagccgctggtaaggatgatatattcgacttcaaatgtgtggatttcggcgcctattttatagctatgcgattggataagaaaacatatctgccgcaagctattaggcgaggtactggagacgcgtggatggttaaaaaggcggcaaaggtcgatccatctgctcaacaattttgtcagtatttgataaaacacaagtctaataatgttattacttgtggtaatgagatgttaaatgaattaggttatagcggttattttatgtcaccgcattggtgttccgattttagtaatatggaatagtgttagataaatgcggtaacgaatgttcctgtaaggaaccataacagtttagatttaacgttaaagatgagcataaacataataaacaaaattacaatcaaacctataacattaatatcaaacaatccaaaaaatgaaatcagtggagtagtaaacgcgtacataactcctggataacgtttagcagctgccgttcctattctagaccaaaaattcggtttcatgttttcgaagcggtgttctgcaacaagtcggggatcgtgttctacatatttggcggcgttatccagtatctgcctattgatcttcatttcgttttcgattctggctatttcaaaataaaatcccgatgatagacctccagactttataatttcatctacgatgttcagcgccgtagtaactctaataatataggctgataagctaacatcataccctcctgtatatgtgaatatggcatgatttttgtccattacaagctcggttttaactttattgcctgtaataatttctctcatctgtaggatatctatttttttgtcatgcattgccttcaagacgggacgaagaaacgtaatatcctcaataacgttatcgttttctacaataactacatattctacctttttattttctaactcggtaaaaaaattagaatcccatagggctaaatgtctagcgatatttcttttcgtttcctctgtacacatagtgttacaaaaccctgaaaagaagtgagtatacttgtcatcatttctaatgtttcctccagtccactgtataaacgcataatccttgtaatgatctggatcatccttgactaccacaacatttcttttttctggcataacttcgttgtcctttacatcatcgaacttctgatcattaatatgctcatgaacattaggaaatgtttctgatggaggtctatcaataactggcacaacaataacaggagttttcaccgccgccatttagttattgaaattaatcatatacaactctttaatacgagttatattttcgtctatccattgtttcacatttacatatttcgacaaaaagatataaaatgcgtattccaatgcttctctgtttaatgaattactaaaatatacaaacacgtcactgtctggcaataaatgatatcttagaatattgtaacaatttattttgtattgcacatgttcgtgatctatgagttcttcttcgaatggcataggatctccgaatctgaaaacgtataaataggagttagaataataatatttgagagtattggtaatatataaactctttagcggtataattagtttttttctctcaatttctatttttagatgtgatggaaaaatgactaattttgtagcattagtatcatgaactctaatcaaaatcttaatatcttcgtcacacgttagctctttgaagtttttaagagatgcatcagttggttctacagatggagtaggtgcaacaattttttgttctacacatgtatgtactggagccattgttttaactataatggtgcttgtatcgaaaaactttaatgcagatagcggaagctcttcgccgcgactttctacatcgtaattgggttctaacgccgatctctgaatggatactagttttctaagttctaatgtgattctctgaaaatgtaaatccaattcctccggcattatagatgtgtatacatcggtaaataaaactatagtatccaacgatcccttctcgcaaattctagtcttaaccaaaaaatcgtatataaccacggagatggcgtatttaagagtggattcttctaccgttttgttcttggatgtcatataggaaactataaagtccgcactactgttaagaatgattactaacgcaactatatagttcaaattaagcattttggaaacataaaataactctgtagacgatacttgactttcgaataagtttgcagacaaacgaagaaagaacagacctctcttaatttcagaagaaaactttttttcgtattcctgacgtctagagtttatatcaataagaaagttaagaattagtcggttaatgttgtatttcattacccaagtttgagatttcataatattatcaaaagacatgataatattaaagataaagcgctgactatgaacgaaatagctatatggttcgctcaagaatatagtcttgttaaacgtggaaacgataactgtatttttaatcacgtcagcggcatctaaattaaatataggtatatttattccacacactctacaatatgccacaccatcttcataataaataaattcgttagcaaaattattaattttagtgaaatagttagcgtcaactttcatagcttccttcaatctaatttgatgctcacacggtgcgaattccactctaacatcccttttccatgcctcaggttcatcgatctctataatatctagtttcttgcgtttcacaaacacgggctcgtctctcgcgatgagatctgtatagtaactatgtaaatgataactagatagaaagatgtagctatatagatgacgatcctttaagagaggtataataactttaccccaatcagataaactattgttatggtcttcggaaaaagaatttttataaatttttccagtattttccaaatatacgtacttgacatctaaaaaatccttaatgataataggaatggataatccgtctattttataaagaaatacatatcgcacattatacttttttttggaaatgggaataccgatgtgtctacataaatatgcaaagtctaaatattttttagagaatcttagttggtccaaattcttttccaagtacggtaatagatttttcatattgaacggtatcttcttaatctctggttctagttccgcattaaatgatgaaactaagtcactatttttataactaacgattacatcacctctaacatcatcatttaccagaatactgatcttcttttgtcgtaaatacatgtctaatgtgttaaaaaaaagatcatacaagttatacgtcatttcatctgtggtattcttgtcattgaaggataaactcgtactaatctcttctttaacagcctgttcaaatttatatcctatatacgaaaaaatagcaaccagtgtttgatcatccgcgtcaatattctgttctatcgtagtgtataacaatcgtatatcttcttctgtgatagtcgatacgttataaaggttgataacgaaaatatttttatttcgtgaaataaagtcatcgtaggattttggacttatattcgcgtctagtagatatgcttttatttttggaatgatctcaattagaatagtctctttagagtccatttaaagttacaaacaactaggaaattggtttatgatgtataatttttttagtttttatagattctttattctatacttaaaaaatgaaaataaatacaaaggttcttgagggttgtgttaaattgaaagcgagaaataatcataaattatttcattatcgcgatatccgttaagtttgtatcgtaatggcgtggtcaattacaaataaagcggatactagtagcttcacaaagatggctgaaatcagagctcatctaaaaaatagcgctgaaaataaagataaaaacgaggatattttcccggaagatgtaataattccatctactaagcccaaaaccaaacgagccactactcctcgtaaaccagcggctactaaaagatcaaccaaaaaggaggaagtggaagaagaagtagttatagaggaatatcatcaaacaactgaaaaaaattctccatctcctggagtcagcgacattgtagaaagcgtggccgctgtagagctcgatgatagcgacggggatgatgaacctatggtacaagttgaagctggtaaagtaaatcatagtgctagaagcgatctttctgacctaaaggtggctaccgacaatatcgttaaagatcttaagaaaattattactagaatctctgcagtatcgacggttctagaggatgttcaagcagctggtatctctagacaatttacttctatgactaaagctattacaacactatctgatctagtcaccgagggaaaatctaaagttgttcgtaaaaaagttaaaacttgtaagaagtaaatgcgtgcacttttttataaagatggtaaactctttaccgataataattttttaaatcctgtatcagacgataatccagcgtatgaggttttgcaacatgttaaaattcctactcatttaacagatgtagtagtatatgaacaaacgtgggaggaggcgttaactagattaatttttgtgggaagcgattcaaaaggacgtagacaatacttttacggaaaaatgcatgtacagaatcgcaacgctaaaagagatcgtatttttgttagagtatataacgttatgaaacgaattaattgttttataaacaaaaatataaagaaatcgtccacagattccaattatcagttggcggtttttatgttaatggaaactatgttttttattagatttggtaaaatgaaatatcttaaggagaatgaaacagtagggttattaacactaaaaaataaacacatagaaataagtcccgatgaaatagttatcaagtttgtaggaaaggacaaagtttcacatgaatttgttgttcataagtctaatagactatataagccgctattgaaactgacggatgattctagtcccgaagaatttctgttcaacaaactaagtgaacgaaaggtatacgaatgtatcaaacagtttggtattagaatcaaggatctccgaacgtatggagtcaattatacgtttttatataatttttggacaaatgtaaagtccatatctcctcttccatcaccaaaaaagttaatagcgttaactatcaaacaaactgctgaagtggtaggtcatactccatcaatttcaaaaagagcttacatggcaacgactattttagaaatggtaaaggataaaaattttttagatgtagtatctaaaactacgttcgatgaattcctatctatagtcgtagatcacgttaaatcatctacggatggatgatatagatctttacacaaataattacaagaccgataaatggaaatggataagcgtatgaaatctctcgcaatgacagctttcttcggagagctaaacacattagatattatggcattgataatgtctatatttaaacgccatccaaacaataccattttttcagtggataaggatggtcagtttatgattgatttcgaatacgataattataaggcttctcaatatttggatctgaccctcactccgatatctggagatgaatgcaagactcacgcatcgagtatagccgaacaattggcgtgtgtggatattattaaagaggatattagcgaatatatcaaaactactccccgtcttaaacgatttataaaaaaataccgcaatagatcagatactcgtatcagtcgagatacagaaaagcttaaaatagctctagctaaaggcatagattacgaatatataaaagacgcttgttaataagtaaatgaaaaaaaactagtcgtttataataaaacacaatatggatgccaacatagtatcatcttctactattgcaacgtatatagacgctttagcaaagaatgcttcagaattagaacagaggtctaccgcatacgaaataaataatgaattggaactagtatttattaagccgccattaattactttgacaaatgtagtgaatatctctacgattcaggaatcgtttattcgatttaccgttactaataaggaaggtgtcaaaattagaactaagattccattatctaaggtacatggtctagatgtaaaaaatgtacagttagtagatgctatagataacatagtttgggaaaagaaatcattagtgacggaaaatcgtcttcacaaagaatgcttgttgagactatcgacagaggaacgtcatatatttttggattacaagaaatatggatcctctatccgactagaattagtcaatcttattcaagcaaaaacaaaaaactttacgatagactttaagctaaaatattttctaggatccggtgcccaatctaaaagttctttgttgcacgctattaatcatccaaagtcaaggcctaatacatctctggaaatagaattcacacctagagacaatgaaaaagttccatatgatgaactaataaaggaattgacgactctatcacgtcatatatttatggcttctccagagaatgtaattctttctccgcctattaacgcacctataaagacttttatgttgcctaaacaagatatagtaggtctggatctggaaaatctatatgccgtaactaagactgacggcattcctataactatcagagttacatcaaacgggttgtattgttattttacacatcttgggtatattattagatatccagttaagagaataatagattccgaagtagtagtctttggtgaggcagttaaggataagaactggaccgtatatctcattaagctaatagagcctgtgaatgcaatcaatgatagactagaagaaagtaagtatgttgaatctaaactagtggatatttgtgatcggatagtattcaagtcaaagaaatatgaaggtccgtttactacaactagtgaagtcgtcgatatgttatctacatatttaccaaagcaaccagaaggtgttattctgttctattcaaagggacctaaatctaacattgattttaaaattaaaaaggaaaatactatagaccaaactgcaaatgtagtatttaggtacatgtccagtgaaccaattatctttggagaatcgtctatctttgtagagtataagaaatttagcaacgataaaggctttcctaaagaatatggttctggtaagattgtgttatataacggcgttaattatctaaataatatctattgtttggaatatattaatacacataatgaagtgggtattaagtccgtggttgtacctattaagtttatagcagaattcttagttaatggagaaatacttaaacctagaatcgataaaaccatgaaatatattaactcagaagattattatggaaatcaacataatatcatagtcgaacatttaagagatcaaagcatcaaaataggagatatctttaacgaggataaactatcggatgtgggacatcaatacgccaataatgataaatttagattaaatccagaagttagttattttacgaataaacgaactagaggaccgttgggaattttatcaaactacgtcaagactcttcttatttctatgtattgttccaaaacatttttagacgattccaacaaacgaaaggtattggcgattgattttggaaacggtgctgacctggaaaaatacttttatggagagattgcgttattggtagcgacggatccggatgctgatgctatagctagaggaaatgaaagatacaacaaattaaactctggaattaaaaccaagtactacaaatttgactacattcaggaaactattcgatccgatacatttgtctctagtgtcagagaagtattctattttggaaagtttaatatcatcgactggcagtttgctatccattattcttttcatccgagacattatgctaccgtcatgaataacttatccgaactaactgcttctggaggcaaggtattaatcactaccatggacggagacaaattatcaaaattaacagataaaaagacttttataattcataagaatttacctagtagcgaaaactatatgtctgtagaaaaaatagctgatgatagaatagtggtatataatccatcaacaatgtctactccaatgactgaatacattatcaaaaagaacgatatagtcagagtgtttaacgaatacggatttgttcttgtagataacgttgatttcgctacaattatagaacgaagtaaaaagtttattaatggcgcatctacaatggaagatagaccgtctacaaaaaactttttcgaactaaatagaggagccattaaatgtgaaggtttagatgtcgaagacttacttagttactatgttgtttatgtcttttctaagcggtaaataataatatggtatgggttctgatatccccgttctaaatgcattaaataattccaatagagcgatttttgttcctataggaccttccaactgtggatactctgtattgttaatagatatattaatacttttgtcgggtaacagaggttctacgtcttctaaaaataaaagtttgataacatctggcctgttcataaataaaaacttggcgattctatatatactcttattatcaaatctagccattgtcttatagatgtgagctactgtaggtgtaccatttgattttctttctaatactatatatttctctcgaagaagttcttgcacatcatctgggaataaaatactactgttgagtaaatcagttattttttttatatcgatattgatggacatttttatagttaaggataataagtatcccaaagtcgataacgacgataacgaagtatttatacttttaggaaatcacaatgactttatcagatcaaaattaacaaaattaaaggagcatgtatttttttctgaatatattgtgactccagatacatatggatctttatgcgtcgaattaaatgggtctagttttcagcacggtggtagatatatagaggtggaggaatttatagatgctggaagacaagttagatggtgttctacatccaatcatatatctgaagatatacccgaagatatacacactgataaatttgtcatttatgatatatacacttttgacgctttcaagaataaacgattggtattcgtacaggtacctccgtcgttaggagatgatagctatttgactaatccgttattgtctccgtattatcgtaattcagtagccagacaaatggtcaatgatatgatttttaatcaagattcatttttaaaatatttattagaacatctgattagaagccactatagagtttctaaacatataacaatagttagatacaaggataccgaagaattaaatctaacgagaatatgttataatagagataagtttaaggcgtttgtattcgcttggtttaacggcgtttcggaaaatgaaaaggtactagatacgtataaaaaggtatctaatttgatataatgaattcagtgactgtatcacacgcgccatatactattacttatcacgatgattgggaaccagtaatgagtcaattggtagagttttataacgaagtagccagttggctgctacgagacgagacgtcgcctattcctgataagttctttatacagttgaaacaaccgcttagaaataaacgagtatgtgtgtgcggtatagatccgtatccgaaagatggaactggtgtaccgttcgaatcaccaaattttacaaaaaaatcaattaaggagatagcttcatctatatctagattaaccggagtaattgattataaaggttataaccttaatataatagacggggttataccctggaattattacttaagttgtaaattaggagaaacaaaaagtcacgcgatctactgggataagatttccaagttactgctgcagcatataactaaacacgttagtgttctttattgtttgggtaaaacagatttctcgaatatacgggcaaagttagaatccccggtaactaccatagtgggatatcatccagcggctagagaccgtcaattcgagaaagatcgatcatttgaaattatcaacgttttactggaattagacaacaaggtacctataaattgggctcaagggtttatttattaatgctttagtgaaattttaacttgtgttctaaatggatgcggctattagaggtaatgatgttatctttgttcttaagactataggtgtcccgtcagcgtgcagacaaaatgaagatccaagatttgtagaagcatttaaatgcgacgagttagaaagatatattgagaataatccagaatgtacactattcgaaagtcttagggatgaggaagcatactctatagtcagaattttcatggatgtagatttagacgcgtgtctagacgaaatagattatttaacggctattcaagattttattatcgaggtgtcaaactgtgtagctagattcgcgtttacagaatgcggcgccattcatgaaaatgtaataaaatccatgagatctaatttttcattgactaagtctacaaatagagataaaacaagttttcatattatctttttagacacgtataccactatggatacattgatagctatgaaacgaacactattagaattaagtagatcatctgaaaatccactaacaagatcgatagacactgccgtatataggagaaaaacaactcttcgggttgtaggtactaggaaaaatccaaattgcgacactattcatgtaatgcaaccacctcatgataatatagaagattacctattcacttacgtggatatgaacaacaatagttattacttttctctacaacgacgattggaggatttagttcctgataagttatgggaaccagggtttatttcattcgaagacgctataaaaagagtttcaaaaatattcattaattctataataaactttaatgatctcgatgaaaataattttacaacggtaccactggtcatagattacgtaacaccttgtgcattatgtaaaaaacgatcgcataaacatccgcatcaactatcgttggaaaatggtgctattagaatttacaaaactggtaatccacatagttgtaaagttaaaattgttccgttggatggtaataaactgtttaatattgcacaaagaattttagacactaactctgttttattaaccgaacgaggagaccatatagtttggattaataattcatggaaatttaacagcgaagaacccttgataacaaaactaattttgtcaataagacatcaactacctaaggaatattcaagcgaattactctgtccaagaaaacgaaagactgtagaagctaacatacgagacatgttagtagattcagtggagaccgatacctatccggataaacttccgtttaaaaatggtgtattggacctggtagacggaatgttttactctggagatgatgctaaaaaatatatgtgtactgtatcaaccggatttaaatttgacgatacaaagttcgtcgaagacagtccagaaatggaagagttaatgaatatcattaacgatatccaaccattaacggatgaaaataagaaaaatagagagctatatgaaaaaacattatctagttgtttatgcggtgctaccaaaggatgtttaacattcttttttggagaaactgcaactggaaagtcgacaaccaaacgtttgttaaagtctgctatcggtgacctgtttgttgagacgggtcaaacaattttaacagatgtattggataaaggacctaatccatttatcgctaacatgcatttgaaaagatctgtattctgtagcgaactacctgattttgcatgtagtgggtcaaagaaaatcagatctgataatattaaaaagttgacagaaccttgtgtcattggaagaccgtgtttctccaataaaattaataatagaaaccatgcgacaatcattatcgatactaattacaaacctgtttttgataggatagataacgcattaatgagaagaattgccgtcgtgcgattcagaacacacttttctcaaccttctggtagagaggctgctgaaaataatgacgcgtacgataaagtcaaactattagacgaggggttagatggtaaaatacaaaataatagatatagattcgcatttctatacttgttggtgaaatggtacagaaaatatcatgttcctattatgaaactatatcctacacccgaagagattcctgactttgcattctatctcaaaataggtactctgttggtatctagctctgtaaagcatattccattaatgacggacctctccaaaaagggatatatattgtacgataatgtggtcactcttccgttgactactttccaacagaaaatatccaagtattttaattctagactatttggacacgatatagagagcttcatcaatagacataagaaatttgccaatgttagtgatgaatatctgcaatatatattcatagaggatatttcatctccgtaaatatatgctcatatatttatagaagatatcacatatctaaatgaataccggaattatagatttatttgataatcatgttgatagtataccaactatattacctcatcagttagctactctagattatctagttagaactatcatagatgagaacagaagcgtgttattgttccatattatgggatcaggtaaaacaataatcgctttgttgttcgccttggtagcttccagatttaaaaaggtttacattctagtgccgaacatcaacatcttaaaaattttcaattataatatgggtgtagctatgaacttgtttaatgacgaattcatagctgagaatatctttattcattccacaacaagtttttattctcttaattataacgataacgtcattaattataacggattatctcgctacaataactctatttttatcgttgatgaggcacataatatctttgggaataatactggagaacttatgaccgtgataaaaaataaaaacaagattccttttctactattgtctggatctcccattactaacacacctaatactctgggtcatattatagatttaatgtccgaagagacgatagattttggtgaaattattagtcgtggtaagaaagtaattcagacacttcttaacgaacgcggtgtgaatgtacttaaggatttgcttaaaggaagaatatcatattacgaaatgcctgataaagatctaccaacgataagatatcacggacgtaagtttctagatactagagtagtatattgtcacatgtctaaacttcaagagagagattatatgattactagacgacagctatgttatcatgaaatgtttgataaaaatatgtataacgtgtcaatggcagtattgggacaacttaatctgatgaataatttagatactttatttcaggaacaggataaggaattgtacccaaatctgaaaataaataatggcgtgttatacggagaagaattggtaacgttaaacattagttccaaatttaaatactttattaatcggatacagacactcaacggaaaacattttatatacttttctaattctacatatggcggattggtaattaaatatatcatgctcagtaatggatattctgaatataatggttctcagggaactaatccacatatgataaacggcaaaccaaaaacatttgctatcgttactagtaaaatgaaatcgtctttagaggatctattagatgtgtataattctcctgaaaacgatgatggtagtcaattgatgtttttgttttcatcaaacattatgtccgaatcctatactctaaaagaggtaaggcatatttggtttatgactatcccagatactttttctcaatacaaccaaattcttggacgatctattagaaaattctcttacgccgatatttctgaaccagttaatgtatatcttttagccgccgtatattccgatttcaatgacgaagtgacgtcattaaacgattacacacaggatgaattaattaatgttttaccatttgacatcaaaaagctgttatatctaaaatttaagacgaaagaaacgaatagaatatactctattcttcaagagatgtctgaaacgtattctcttccaccacatccatcaattgtaaaagttttattgggagaattggtcagacaatttttttataataattctcgtattaagtataacgataccaagttacttaaaatggttacatcagttataaaaaataaagaagacgctaggaattacatagatgatattgtaaacggtcacttctttgtatcgaataaagtatttgataaatctcttttatacaaatacgaaaacgatattattacagtaccgtttagactttcctacgaaccatttgtttggggagttaactttcgtaaagaatataacgtggtatcttctccataaaactgatgagatatataaagaaataaatgtcgagctttgttaccaatggataccttccagttacattggagccacacgagctgacgttagacataaaaactaatattaggaatgccgtatataagacgtatctccatagagaaattagtggtaaaatggccaagaaaatagaaattcgtgaagacgtggaattacctctcggcgaaatagttaataattctgtagttataaacgttccgtgtgtaataacctacgcgtattatcacgttggggatatagttagaggaacattaaacatcgaagatgaatcaaatgtaactattcaatgtggagatttaatctgtaaactaagtagagattcgggtactgtatcatttagcgattcaaagtactgcttttttcgaaatggtaatgcgtatgacaatggcagcgaagtcactgccgttctaatggaggctcaacaaggtatcgaatctagttttgtttttctcgcgaatatcgtcgactcataagaaagagaatagcggtaagtataaacacgaatactatggcaataattgcgaatgttttattcccttcgatatatttttgataatatgaaaaacatgtctctctcaaatcggacaaccatctcataaaatagttatctcgcgctggcgaggtggttgccgctcgtataatctccccagaataatatacttgcgtgtcgtcgttcaatttatacggatttctatagttctctgttatataatgcggttttccatcatgattagacgacgacaatagtgttctaaatttagatagttgatcagaatgaatgtttattggcgttggaaaaattatccatgctgcgtctgcagagtggttgatagttgttcctagatatgtaaaataatccaacgtactaggtagcaaattgtctagataaaatactgaatcaaacggcgcagacgtattagcggatctaatggaatccaattgattgactatcttttgaaaatatacatttttatgatccgatacttgtaagaatatagaaataatgataagtccatcatcgtgtttttttgcctcttcataagaactatattttttcttattccaatgaacaagattaatctctccagagtatttgtacacatctatcaagtgattggatccataatcgtcttcctttccccaatatatatgtagtgatgataacacatattcattggggagaaaccctccacttatatatcctcctttaaaattaatccttactagttttccagtgttctggatagtggttggtttcgactcattataatgtatgtctaacggcttcaatcgcgcgttagaaattgcttttttagtttctatattaataggagatagttgttgcggcatagtaaaaatgaaatgataactgtttaaaaatagctcttagtatgggaattacaatggatgaggaagtgatatttgaaactcctagagaattaatatctattaaacgaataaaagatattccaagatcaaaagacacgcatgtgtttgctgcgtgtataacaagtgacggatatccgttaataggagctagaagaacttcattcgcgttccaggcgatattatctcaacaaaattcagattctatctttagagtatccactaaactattacggtttatgtactacaatgaactaagagaaatctttagacggttgagaaaaggttctatcaacaatatcgatcctcactttgaagagttaatattattgggtggtaaactagataaaaaggaatctattaaagattgtttaagaagagaattaaaagaggaaagtgatgaacgtataacagtaaaagaatttggaaatgtaattctaaaacttacaacacgggataaattatttaataaagtatatataggttattgcatggcgtgttttattaatcaatcgttggaggatttatcgcatactagtatttacaatgtagaaattagaaagattaaatcattaaatgattgtattaacgacgataaatacgaatatctgtcttatatttataatatgctagttaatagtaaatgaacttttacagatctagtataattagtcagattattaagtataatagacgactagctaagtctattatttgcaaggatgactctcaaattattacactcacggcattcgttaaccaatgcctatggtgtcataaacgagtatccgtgtccgctattttattaactactgataacaaaatattagtatgtaacagacgagatagttttctctattctgaaataattagaactagaaacatgtttagaaagaaacgattatttctgaattattccaattatttgtccaaacaggaaagaagtatactatcgtcatttttttctctatatccagctactgctgataatgatagaatagacgctatttatccgggtggcatacccaaaaggggtgagaatgttccagagtgtctatccagggaaatcaaagaagaagttaatatagacaattcttttgtattcatagacactcggttttttattcatggtatcatagaagataccattatcaacaaattttttgaggtaattttctttgtcggaagaatatctctaacgagtgatcaaattattgatacctttaaaagtaatcatgaaatcaaggatctaatatttttagatccgaattcaggtaatggactccaatacgaaattgcaaaatatgctctagatactgcaaaacttaaatgttacggccatagaggatgttattatgaatcattaaaaaaattaactgaggatgattgattagaaaatataaattaatttaccatcgtgtatttttataacgggattgtccggcatatcatgtagatagttaccgtctacatcgtatactcgaccatctacgcctttaaatcctctatttattgacattaatctattagaattggaataccaaatattagtaccctcaattagtttattggtaatattttttttagacgatagatcgatggctcttgaaaccaaggttttccaaccggactcattgtcgatcggtgagaagtctttttcattagcatgaatccattctaatgatgtatgtttaaacactctaaacaattggacaaattcttttgatttgctttgaatgatttcaaataggtcttcgtctacagtaggcataccattagataatctagccattataaagtgcacgtttacatatctacgttctggaggagtaagaacgtgactattgagacgaatggctcttcctactatctgacgaagagacgcctcgttccatgtcatatctaaaatgaagatatcattaattgagaaaaaactaataccctcgcctccactagaagagaatacgcatgttttaatgcattctccgttagtgtttgattcttggttaaactcagccaccgccttgattctagtatcttttgttctagatgagaactctatattagagataccaaagactttgaaatatagtaataagatttctattcctgactgattaacaaatggttcaaagactagacatttaccatgggatgctaatattcccaaacatacatctataaatttgacgcttttctcttttaattcagtaaatagagagatatcagccgcactagcatcccctttcaatagttctccctttttaaaggtatttaatgcggatttagaaaactctctatctcttaatgaatttttaaaatcattatatagtgttgctatctcttgcgcgtattcgccgggatcacgattttgtctttcaggaaagctatcgaacgtaaacgtagtagccatacgtctcagaattctaaatgatgatataccagtttttatttctgcgagtttagccttttgataaatctcttcttgcttttttgacatattaacgtatcgcattaatactgttttcttagcgaatgatgcagacccttctacgttatcaaaaatagaaaactcgttattaactatgtacgaacataggcctcctagtttggagactaattctttttcatcgactagacgtttattctcaaatagtgattggtgttgtaaggatcctggtcgtagtaagttaaccaacatggtgaattcttgcacactattgacgataggtgtagccgataaacaaatcatcttatggttttttaatgcgatggtcttggataaaaaattatatactgaacgagtaggacggatcttaccatcttctttgattaatgatttagaaatgaagttatgacattcatcaataatgacgcatattctactcttggaattaatagttttgatattagtaaaaaatttatttctaaaattttgatcatcgtaattaataaaaatacaatccttcgttatctctggagcgtatctgagtatagtgttcatccaaggatcttctatcaaagcctttttcaccaataagataatagcccaattcgtataaatatccttaagatgtttgagaatatatacagtagtcattgttttaccgacacccgtttcatggaacaataaaagagaatgcatactgtctaatcctaagaaaactcttgctacaaaatgttgataatccttgaggcgtactacgtccgaccccatcatttcaacgggcatattagtagttctgcgtaaggcataatcgatataggccgcgtgtgatttactcatttatgagtgataagtaataactatgttttaaaaatcacagcagtagtttaactagtcttctctgatgtttgttttcgatactttttgaatcagaagtcatactagaataaagcaacgagtgaacgtaatagagagcttcgtatactctattcgaaaactctaagaacttattaatgaattccgtatccactggattgtttaaaatactaaattgaacactgttcacatccttccaagaagaagacttagtgacggacttaacatgagacataaataaatccaaattttttttacaaacatcactagccaccataatggcgctatctttcaaccagctatcgcttacgcattttagcagtctaacatttttaaagagactacaatatattctcatagtatcgattacacctctaccgaataaagttggaagtttaataatacaatatttttcgtttacaaaatcaaataatggtcgaaacacgtcgaaggttaacatcttataatcgctaatgtatagattgttttcagtgagatgattattagatttaatagcatctcgttcacgtttgaacagtttattgcgtgcgctgaggtcggcaactacggcgtccgctttagtactcctcccataatactttacgctattaatctttaaaatttcatagactttatctagatcgctttctggtaacatgatatcatgtgtaaaaagttttaacatgtcggtcggcattctatttagatcattaactctagaaatctgaagaaagtaattagctccgtattccagactaggtaatgggcttttacctagagacagattaagttctggcaatgtttcataaaatggaagaaggacatgcgttccctcccggatattttttacaatttcatccatttacaactctatagtttgttttcattattattagttattatctcccataatcttggtaatacttaccccttgatcgtaagataccttatacaggtcattacatacaactaccaattgtttttgtacataatagattggatggttgacatccatggtggaataaactactcgaacagatagtttatctttccccctagatacattggccgtaatagttgtcggcctaaagaatatctttggtgtaaagttaaaagttagggttcttgttccattattgctttttgtcagtagttcattataaattctcgagatgggtccgttctctgaatatagaacatcatttccaaatctaacttctagtctagaaataatatcggtcttattcttaaaatctattcccttgatgaagggatcgttaatgaacaaatccttggcctttgattcggctgatctattatctccgttatagacgttacgttgactagtccaaagacttacaggaatagatgtatcgatgatgttgatactatgtgatatgtgagcaaagattgttctcttagtggcatcactatatgttccagtaatggcggaaaactttttagaaatgttatatataaaagaattttttcgtgttccaaacattagcagattagtatgaagataaacactcatattatcaggaacattatcaatttttacatacacatcagcatcttgaatagaaacgataccatcttctggaacctcaacaatctcggcagactccggataaccagtcggtggaccatcgctaacaataactagatcatccaacaatctactcacatatgcatctatataatctttttcatcttgtgagtaccctggatacgaaataaatttattatccgtatttccataataaggtttagtataaacagagagcgatgttgccgcatgaacttcagttacagtcgccgttggttggtttatttgacctattactctcctaggtttctctataaacgatggtttaatttgtacattcttaaccatatatccaataaagctcaattcaggaacataaacaaattctttgttgaacgtttcaaagtcgaacgaagagtcacgaataacgatatcggatactggattgaaggttaccgttacggtaatttttgaatcggatagtttaagactgctgaatgtatcttccacatcaaacggagttttaatataaacgtatactgtagatggttctttaatagtgtcattaggagttaggccaatagaaatatcattaagttcactagaatatccagagtgtttcaaagcaattgtattattgatacaattattatataattcttcgccctcaatttcccaaataacaccgttacacgaagagatagatacgtgattaatacatttatatccaacatatggtacgtaaccgaatcttcccatacctttaacttctggaagttccaaactcagaaccaaatgattaagcgcagtaatatactgatccctaatttcgaagctagcgatagcctgattgtctggaccatcgtttgtcataactccggatagagaaatatattgcggcatatataaagttggaatttgactatcgactgcgaagacattagaccgtttaatagagtcatccccaccgatcaaagaattaatgatagtattattcattttctatttaaaatggaaaaagcttacaataaactccgtagagaaatatctataatttgtgagttttccttaaagtaacagcttccgtaaacgccgtctttatctcttagtaagtttattgtatttataaccttttccttatcttcatagaatactaaaggcaacaaagaaatttttggttcttctctaagagctacgtgagacttaaccatagaagccaacgaatccctacatattttagaacagaaataccctacttcaccacccttgtatgtctcaatactaataggtctaaaaaccaaatcttgattacaaaaccaacacttatcaattacactatttgtcttaatagacacatctgccatagatttataatactttggtagtatacaagcgagtgcttcttctttagcgggcttaaagactgctttaggtgctgaaataaccacatctggaaggcttactcgcttagccatttaattacggaactatttttttatacttctaatgagcaagtagaaaacctctcatctacaaaaacatactcgtgtccataatcctctaccatagttacacgttttttagatctcatatgtgctaaaaagttttcccatactaattggttactattatttttcgtataatttttaacagtttgaggttttagatttttagttacagaagtgatatcgaatattttatccaaaaagaatgaataattaattgtcttagaaggagtgttttcttggcaaaagaataccaagtgcttaaatatttctactacttcattaatcttttctgtactcagattcagtttctcatcttttacttgattgattatttcaaagactaacttataatcctttttatttattctctcgttagccttaagaaaactagatacaaaatttgcatctacatcatccgtggatatttgatttttttccatgatatccaagagttccgagataatttctccagaacattgatgagacaataatctccgcaatacatttctcaaatgaataagtttattagacacgtggaagtttgactttttttgtacctttgtacatttttgaaataccgactcgcaaaaaatacaatattcatatccttgttcagatactataccgttgtgtctacaaccgctacataatcgtagattcatgttaacactctacgtatctcgtcgtccaatattttatataaaaacattttatttctagacgttgccagaaaatcctgtaatacttttagttttttgggctgtgaataaagtatcgccctaatatggttaccgtcctccgccaatatagtagttaaattatccgcacatgcaaaagaacaccgcttaggcggattcagtacaatgttatatttttcgtaccaactcatttaaatatcataatctaaaatagttctgtaatatgtctagcgctaatatattgatcataatcctgtgcataaattaagatacaacaatgtctcgaaatcatcgacatggcttcttccatagttagaagatcgtcgtcaaagttagcaacgtgattcatcaacatttgctgttttgaggcagcaaatactgaaccgtcgccattcaaccattcataaaaaccatcgtctgaatccattgataatttcttgtactggtttttgagagctcgcatcaatctagcatttctagctcccggattgaaaacagaaagaggatcgtacatccagggtccattttctgtaaatagaatcgtataatgtcccttcaagaagatatcagacgatccacaatcaaagaattggtctccgagtttgtaacaaactgcggactttaacctatacatgataccgtttagcataatttctggtgatacgtcaatcggagtatcatctattagagatctaaagccggtgtaacattctccaccaaacatattcttattctgacgtcgttctacataaaacatcattgctccattaacgataacaggggaatgaacagcactacccatcacattagttcccaatggatcaatgtgtgtaactccagaacatcttccatagcctatgttaggaggagcgaacaccactcttccactattgccatcgaatgccatagaataaatatccttggaattgatagaaatcggactgtcggatgttgtgatcatcttcataggattaacaacgatgtatggtgccgcctgaagtttcatatcgtaactgatgccgttcataggtctagccacagaaaccaacgtaggtctaaatccaactatagacaaaatagaagccaatatctgttcctcatctgtcataacttgagagcatccagtatgaataatcttcattagatggggatctaccgcatcatcatcgttacaataaaaaattcccattctaatgttcataattgcttttctaatcatggtatgcatgtttgctctctgaatctctgtggaaattagatctgatacacctgtaatcactatcggattatcctccgtaagacgattaaccaacaacatataattataagactttacttttctaaattcataaagttgctggattaggctataggtgtctccatgtacatacgcgttctcgagcgcaggaagtttaataccgaatagtgccatcagaataggatgaatatagtaattagtttctggttttctataaataaaagacaaatcttgtgaactagacatatcggtaaaatgcatggattggaatcgtgtagtcgacagaagaatatgatgattagatggagagtatattttatctaactctttgagttggtcaccgattctaggactagctcgagaatgaataagtactaaaggatgagtacatttcacagaaacactagcattgttcaatgtgctctttacatgggtaaggagttgaaatagctcgtttctatttgttctgacaatatttagtttattcataatgttaagcatatcctgaatagtaaagttagatgtgtcatacttgttagtagttagatatttagcaattgcattcccatcatttctcaatctcgtactccaatcatgcgtggatgctacttcgtcgatggaaaccatacaatcctttttgataggctgttgagattgattatttcctgcacgtttaggtttggtacgttgatttctagcccctgcggatataaagtcatcgtctacaatttgggacaatgaattgcatacactacaagacaaagatttatcagaagtgtgaatatgatcttcatctaccaaagaaagagtttgattagtataactagattttagtcctgcgttagatgttaaaaaaacatcgctattgaccacggcttccattatttatattcgtagtttttactcgaaagcgtgattttaatatccaatcttattacttttggaatcgttcaaaacctttgactagttgtagaatttgatctattgccctacgcgtatactcccttgcatcatatacgttcgtcaccagatcgtttgtttcggcctgaagttggtgcatatctttttcaacactcgacatgagatccttaagggccatatcgtctagattttgttgagatgctgctcctggatttggattttgttgtgctgttgtacatactgtaccaccagtaggtgtaggagtacatacagtggccacaataggaggttgaggaggtgtaaccgttggagtagtacaagaaatatttccatccgattgttgtgtacatgtagttgttggtaacgtctgagaaggttgggtagatggcggtgtcgtcgtcttttgatctttattaaatttagagataatatcctgaacagcattgctcggcgtcaacgctggaaggagtgaactcgccggcgcatcagtatctgcagacagccaatcaaaaagattagacatatcagatgatgtattagtttgttgtcgtggttttggtgtaggagcagtactactaggtagaagaataggagccgatgtaggtgtcggaaccggctgtggagttatatgaatagttggttgtagcggttggataggctgtctgctggcggccatcatattatctctagctagttgttctcgcaactgtctttgataatacgactcttgagactttagtcctatttcaatcgcttcatcctttttcgtatccggatccttttcttcagaataatagattgacgactttggtgtagaggattctgccagcccctgtgagaacttgttaaagaagtccatttaaggctttaaaattgaattgcgattataagattaaatggcagacacagacgatattatcgactatgaatccgatgatctcactgaatacgaggatgatgaagaagaggaagaagatggagagtcactagaaactagtgatatagatcccaaatcttcttataagattgtagaatcagcatccactcatatagaagatgcgcattccaatcttaaacatatagggaatcatatatctgctcttaaacgacgctatactagacgtataagtctatttgaaatagcgggtataatagcagaaagctataacttgcttcaacgaggaagattacctctagtttcagaattttctgacgaaacgatgaagcaaaatatgctacatgtaattatacaagagatagaggagggttcttgtcctatagtcatcgaaaagaacggagaattgttgtcggtaaacgattttgacaaagatggtctaaaattccatctagactatattatcaaaatttggaaacttcaaaaacgatattagaatttatacgaatatcgttctctaaatgtcacaatcaagtctcgcatgttcagcaatttattgtcgtactttatatcgtgttcattaacgatatcttgcaaaatagtaatgattctatcttccttcgatagatattcttcagagattattgtcttatattctttcttgttatcagatatgaatttgataagactttgaacattattgatacccgtctgtttaattttttctacagatattttagttttggcagattctatcgtatctgtcaatagacatccaacatcgacattcgacgtcaattgtctataaatcaacgtataaattttagaaataacattagcgaattgttgtgcattgatgtcgttattctgaaacagtatgattttaggtagcattttcttaacaaagagaacgtatttattgttactcagttgaacagatgatatatccagattactaacgcatctgattccgtataccaaactttcagaagaaatggtatacaattgtttgtattcattcaatgtctctttttcagaaattagtttagagtcgaatactgcaataattttcaagagatagttttcatcagataagattttatttagtgtagatatgataaaactattgttttgttggagaacttgatacgccgcgttctctgtagtcgacgctctcaaatgggaaacgatctccattatttttttggaatcggatactatatcttcggtatcttgacgcagtctagtatacatagagttaagagagattagagtttgtacattaagcaacatgtctctaaatgtggctacaaacttttccttttccacatcatctagtttattatataccgatttcacaacggcaccagatttaaggaaccagaatgaaaaactctgataactacaatatttcatcatagttacgattttatcatcttctatagttggtgtaatagcgcatacctttttctccaagactggaaccaacgtcataaaaatgtttaaatcaaaatccatatcaacatctgatgcgctaagaccagtctcgcgttcaagattatctttactaatggtgacgaactcatcgtatagaactctaagtttgtccattatttatttacagatttagttgtttaatttatttgtgctcttccagagttgggatagtatttttctaacgtcggtattatattattaggatctacgttcatatgtatcataatattaatcatccacgttttgataaatctatctttagcttctgaaataacgtatttaaacaaaggagaaaaatatttagctacggcatcagacgcaataacattttttgtaaatgtaacgtatttagacgacagatcttcgttaaaaagttttccatctatgtagaatccatcagttgttaacaccattcccgcgtcagattgaataggagtttgaatagtttgttttggaaatagatccttcaataacttatagttgggtgggaaaaaatcgattttatcactagactctttcttttttactatcattacctcatgaactatttcttgaatgagtatatgtattttctttcctatatcggacgcgttcattggaaaatataccatgtcgttaactataagaatatttttatcctcgtttacaaactgaataatatcagatgtagttcgtaaacgaactatatcatcaccagcacaacatctaactatatgatatccactagtttcctttagtcgtttattatcttgttccatattagcagtcattccatcatttaagaaggcgtcaaagataatagggagaaatgacattttggattctgttacaactttaccaaaattaaggatatacggacttactatctttttctcaacgtcaatttgatgaacacacgatgaaaatgtacttcgatgagattgatcatgtagaaaacaacaagggatacaatatttccgcatatcatgaaatatattaagaaatcccaccttattatatttccccaaaggatccatgcacgtaaacattatgccgttatcattaataaagacttctttctcatcggatctgtaaaagttgttactgatttttttcattccaggatctagataattaataatgatgggttttctattcttattctttgtattttggcatatcctagaccagtaaacagtttccactttggtaaaatcagcagacttttgaacgctattaaacatggcattaatggcaataactaaaaatgtaaaatatttttctatgttaggaatatggtttttcactttaatagatatatggtttttggccaaaatgatagatatttttttatccgaggatagtaaaatattattagtcgccgtctctataaaaatgaagctagtctcgatatccaattttattctagaattgataggagtcgccaaatgtaccttatacgttatatctcccttgatgcgttccatttgtgtatctatatcggacacaagatctgtaaatagttttacgttattaatcatcacggtatcgccgtcgctagataatgctaatgtaccatccaagtcccaaatggagagatttaactgttcatcgtttagaataaaatgattaccggtcatattaataaagtgttcatcgtatctagataacaacgacttataattaatgtccaagtcttgaactcgctgaatgatcttttttaacccagttagttttagattggtacgaaatatattgttaaactttgattctacagtaatgtccaaatctagttgtggaaatacttccatcaacattgtttcaaacttgataatattattatctacatcttcatacgatccaaattccggaatagatgtatcacatgctcttgccacccagataaccaaaaagtcacacgctccaggatatacattgtataaaaagctatcgtttttaagtagggtttttttctgcgtgtatacgaagggattaaaaatagtattatcaacgtaactatattccaaattattcttatgagaatagataataatatcgtccttaatatctaacaaatttcctaaatatccctttaattgagtcattcgaagcgtcaatagaatatgtctcttaactatttccggctgttgtatatttaaatgacttcgtaaaaaataatatatgggcgacttctcatctatgtaatcatatggagtgagatatagggctcgttctacctcctgccccttacccacctgtaataccaattgcggacttactatatatcgcatatttatatcgtggggtaaagtgaaaatctactaccgatgatgtaagtcttacaatgttcgaaccagtaccagatcttaatttggaggcctccgtagaactaggggaggtaaatatagatcaaacaacacctatgataaaggaaaatagcggttttatatcccgtagtagacgtctattcgcccatagatctaaggatgatgagagaaaactagcactacgattctttttacaaagactttattttttagatcatagagagattcattatttgttcagatgcgttgacgctgtaaaagacgtcactattaccaaaaaaaataacattatcgtggcgccttatatagcacttttaactatcgcatcaaaaggatgcaaacttacagaaacaatgattgaagcattctttccagaactatataatgaacatagtaagaaatttaaattcaactctcaagtatccatcatccaagaaaaactcggataccagtttggaaactatcacgtttatgattttgaaccgtattactctacagtagctctggctattcgagatgaacattcatctggcatttttaatatccgtcaagagagttatctggtaagttcattatctgaaataacatatagattttatctaattaatctaaaatctgatcttgttcaatggagtgctagtacgggcgctgtaattaatcaaatggtaaatactgtattgattacagtgtatgaaaagttacaactggtcatagaaaatgattcacaatttacatgttcattggctgtggaatcagaacttccaataaaattacttaaagatagaaatgaattatttacaaaattcatcaacgagttaaaaaagaccagttcattcaagataagcaaacgcgataaggatacgctactaaaatattttacttaggactggagttagaatttatagacgactcatttcgtttatcattattactaccatcattattagtattcttcttgttatcttgttcagaaatatacagcaatgctatgcctaatactaaatacattatcatgcttgcaatggctctaacaacgacgaaccaaaatgaatttggtcgtagcttttgttcacaaaaatacataaagaaatgtctacataaatctatggcgccattggctacttgaaatagcgccagtcctcctacagattttaatatagctgtataacatgacatttattcatcatcaaaagagacagagtcaccatctgtcatatttagattttttttcatgtgttcaaagtatcctctactcatttcattataatagtttatcatacttagaattttaggacggatcaatgagtaagacttgactagatcgtcagtagtaatttgtgcatcgtctattctgcatccgcttcgtcgaataatgtatagcatcgctttgagattctccatagctatcaagtctttatacaatgacatggaaatatctgtgaatactttatacttctccaacatcgatgccttaacatcatcgcctactttagcattgaaaatacgttctattgtgtagatggatgtagcaagatttttaaacaacaatgccatcttacacgatgattgcctcaagtctccaatcgtttgtttagaacgattagctacagagttcaacgcttggctgactagcatattattatctttagaaattgtattcttcaatgaagcgtttatcatatctgtgatttcgttagtcatattacagtctgactgggttgtaatgttatccaacatatcacctatggatacggtacacgtaccagcatttgtaataatcctatctaagatgttgtatggcattgcgcagaaaatatcttctcctgtaatatctccactctcgataaatctactcagattattcttaaatgccttattctctggagaaaagatatcagtgtccatcatttcattaatagtatacgcagaaaagataccacgagtatcaattctatccaagatacttatcggttccgagtcacagataatggtttcctctccttcgggagatcctgcatagaaatatctaggacaatagtttctatactgtctgtaactctgataatctctaaagtcactaactgataccatgaaattgagaagatcaaacgctgaagtaatcaatttttctgcctcgtttttactacaactagttttcatcaatgtagtgacgatgtattgtttagttactcttggtctaatactgatgatagagatattattacttcccataatggatcttctagtagtcaccttaaagcccattgatgcaaatagcagatagataaagtcttggtatgactcctttctaatatagtacggactacctttgtcacccaactttatacccacataagccataacaacctctttaatagccgtttcatgaggtttatcagccatgagcctgagtagttggaagaatctcatgaatcccgtctcagaaagtcctatatgcatgatagatttatctttcctgggaaactctcgtatagtcatagatgaaatactcttcaaagtttctgaaataagattagtaacagtcttacctccgactactctgggtaacaaacatactctaataggtgttttctctgcggagataatatcagaaaggatagagcaataagtagtattattgtgattataaagaccgaatacataacaggtagaatttataaacatcatgtcctgaaggtttttagacttgtattcctcgtaatccataccgtcccaaaacatggatttggtaactttgatagccgtagatctttgttccttcgccaacaggttaaagaaattaataaagaatttgttgtttctatttatgtccacaaattgcacgtttggaagcgtaactgttacgttcactgcagcattttgaggatcgcgagtatgaagtacgatgttattgtttactggtatatctggaaagaaatctaccagtctaggaataagagattgatatcgcatagaaatagtaaagtttataatctcatcatcgaagagcattttgttaccattgtaataaatatccactctgtcatatgtataaatgaagtactgttcaaacatgatgagatgtttatatgttggcatagtagtgagatcgacgtttggtaatggcaatgtattaagattaactccataatgtctagcagcatctgcgatgttataagtgtcgtcaaagcggggtcgatcttgtgctgttatatattgtctaacacctataagattatcaaaatcttgtctgcttaatacaccgttaacaatttttgccttgaattcttttattggtgcattaataacatccttatagaggatgttaaacaaataagtgttatcaaagttaagatctggatatttcttttctgctagaacatccattgagtcggagccatctggtttaatataaccaccgataaatctagctctgtattctgtatccgtcaatctaatattaagaaggtgttgagtgaaaggtggaagatcgtaaaagctgtgagtattaatgataggattagtttccgaactaatgttaattggggtattaataatatctatatttccagcgttaagtgtaacattaaacagttttaattcacgtgacgtggtatcaattaaataattaatgcccaatttggatatagcagcctgaagctcatcttgtttagttacggatcctaatgagttattaagcaatatatcgaacggatgaacgaaggttgttttaagttggtcacatactttgtaatctagacatagatgcggaagaacggtagaaactatacgaaataaatattcagagtcctctaattgatcaagagtaactattgacttaataggcatcatttatttagtattaaatgacgaccgtaccagtgacggatatacaaaacgatttaattacagagttttcagaagataattatccatctaacaaaaattatgaaataactcttcgtcaaatgtctattctaactcacgttaacaacgtggtagatagagaacataatgccgccgtagtgtcatctccagaggaaatatcctcacaacttaatgaagatctatttccagatgatgattcaccggccactattatcgaacgagtacaacctcatactactattattgacgatactccacctcctacttttcgtagagagttattaatatcggaacaacgtcaacaacgagaaaaaagatttaatattacagtatcgaaaaatgctgaagcaataatggaatctagatctatgataacttctatgccaacacaaacaccatccttgggagtagtttatgataaagataaaagaattcagatgttagaggatgaagtggttaatcttagaaatcaacgatctaatacaaaatcatctgataatttagataattttaccaaaatactatttggtaagactccgtataaatcaacagaagttaataagcgtatagccatcgttaattatgcaaatttgaacgggtcccccttatcagttgaggacttggatgtttgttcggaggatgaaatagatagaatctataaaacgattaaacaatatcacgaaagtagaaaacgaaaaattatcgtcactaacgtgattattattgtcataaacattatcgagcaggcattgctaaaactcggatttgaagaaatcaaaggactgagtaccgatatcacttcagaaattatcgatgtggagatcggagatgactgcgatgctgtagcatctaaactaggaatcggtaacagtccggttcttaatattgtattgtttatactcaagatattcgttaaacgaattaaaattatttaatttaatacattcccatatccagacaacaatcgtctggattaatctgttcctgtcgtctcataccggacgacatattaatctttttattagtaggcatctttttagatggtttctttttcccagcattaactgagtcgatacctagaagatcgtgattgatctctccgaccattccacgaacttctaattggccgtctctgacggtaccataaactattttaccagcattagtaacagcttggacaatctgaccatccattgcgttgaatgatgtagttgctgttgttctacgtttaggagcaccagaagtatttttggagcccttggaggctgatgtagaagaagacgaggattttgatttacatgtaatacattttgtactctttgattttgtatcacatgcgccggcagtcacatttgtttgagaattaagattattgttgcctcctttgacggctgcatctccaccgatttgcgctagtagatttttaagctgtggtgtaatcttattaactgtttcgatataatcatcgtaactgcttctaacggctaaattttttttatccgccatttagaagctaaaaatatttttatttatgcagaagatttaactagattatacaatgaactaatatgatccttttccagattatttacaaacttggtattttttggttctggaggaggcgaatttaaattcggacttggattcggattttgtgagttcttgatcttattatacatcgagtataggatggcgacggtaactgctacgcaaataccgatcaacaaaagaataccaatcatttattgacaataacttcactattgatcaagtatgcaatatatcatcttttcactaaataagtagtaataatgattcaacaatgtcgagatatatggacgataataatttagttcatggaaatatcgctatgattggtatgaatgactccgctaactctgtggggtgcgcagtgctttccccacatagaataaattagcattccgactgtgataataataccaagtataaacgccataatactcaatactttccatgtacgagtgggactggtagacttactaaagtcaataaaggcgaagatacacgaaagaatcaaaagaatgattccagcgattagcacgccggaaaaataatttccaatcataagcatcatgtccatttaactaataaaaattttaaatcgccgaatgaacaaagtggaatataaaccatataaaaacaatagtttgtactgcaaaaataatatctatttttgttttcgaagatatggtaaaattaaatagtagtacacagcatgttataactaacagcagcaacggctcgtaattacttatcatttactagacgaaaaggtggtgggatattttcttgctcaaataatacgaatatatcacccatccattttatgcgatgtttatatactctaatctttaatagatctatagacgacgggtttaccaacaatatagattttatcgattcatctaatttaaacccttccttaaacgtgaatgatctattatctggcataacgatgactctacctgatgaatcggacaatgtactgggccatgtagaataaattatcaacgaattatcgtctacgaacatttatatcatttgttttaattttaggacgcgaataaatggatataaaatagaaaataacagatattacaaccaatgttatggccgcgcccaaccaggtaggcagttttattttatcttttactacaggttctcctggatgtacgtcaccaacggcggacgtagttctagtacaattagacgtaagttctgcttgggaattttttaacgctaaagagttaacgttaatcgtgcacccaacgtatttacatctagttctttgaacatcttgattataatataaccattttctatctctagattcgtcggtgcactcatgtaaccaacataccctaggtcctaaatatttatctccggaattagattttggataattcgcgcaccaacaatttctatttcctttatgatcgttacaaaagacgtataatgccgtatccccaaaagtaaaataatcaggacgaataattctaataaactcagaacaatatctcgcatccatatgtttggagcaaatatcggaataagtagacatagccggtttccgttttgcacgtaaccattctaaacaattggggtttccaggatcgtttctacaaaatccagtcatgaaatcatcacaatgttctgtcttgtaattattattaaatatttttggacagtgtttggtatttgtcttagaacaacattttgccacgctatcactatcgcccaggagataatccttttttataaaatgacatcgttgcccggatgctatataatcagtggcgtgttttaaatccttaatatattcaggagttacctcgttctgataatagattaatgatccaggacgaaatttgaaagaactacatggttctccatgaattaatacatattgtttagcaaattcaggaactataaaactactacaatgatctatcgacataccatctatcaaacaaaacttgggtttaatttctcccggagatgtttcataatagtacgtataactttcttctgcaaacttaacagctctattatattcaggataattaaaacctaattccatatatttgtctcgtatatctgctattcctggtgctattttaattctattaagagtaacggctgcccccattcttaataatcgtcagtatttaaactgttaaatgttggtatatcaacatctaccttatttcccgcagtataaggtttgttgcaggtatactgttcaggaatggttacatttatacttcttctatagtcctgtctttcgatgttcatcacatatgcaaagaacagaataaacaaaataatgtaagaaataatattaaatatctgtgaattcgtaaatacattgattgccataataattacagcagctacaatacatacaatagacattcccacagtgttgccattacctccacgatacatttgagttactaagcaataggtaataactaagctagtaagaggcaatagaaaagatgagataaatatcatcaatatagagattagaggagggctatatagagccaagacgaacaaaatcaaaccgagtaacgttctaacatcattatttttgaagattcccaaataatcattcattcctccataatcgttttgcattatacctccatctttaggcataaacgattgctgctgttcctctgtaaataaatctttatcaagcactccagcacccgcagagaagtcgtcaagcatattgtaatatcttaaataactcatttatatattaaaaaatgtcactattaaagatggagtataatctttatgccgaactaaaaaaaatgacttgtggtcaacccctaagtctttttaacgaagacggggatttcgtagaagttgaaccgggatcatcctttaagtttctgatacctaagggattttacgcctctccttccgtaaagacgagtctagtattcgagacattaacaacgaccgataataaaatcactagtatcaatccaacaaatgcgccaaagttatatcctcttcaacgcaaagtcgtatctgaagtagtttctaatatgaggaaaatgatcgaatcaaaacgtcctctatacattactcttcacttggcgtgtggatttggtaagactattaccacgtgttatcttatggctacacacggtagaaaaaccgtcatttgcgtacccaataaaatgttaatacatcaatggaagacacaggtagaggcagtcggattggaacataagatatctatagatggagtaagtagtctattaaaggaactaaagactcaaagtccggatgtattaatagtagtcagtagacatctgacaaacgatgccttttgtaaatatatcaataagcattatgatttgttcatcttggatgaatcacatacgtataatctgatgaacaatacagcagttacaagatttttagcgtattatcctccgatgatgtgttattttttaactgctacacctagaccagctaaccgaatttattgtaacagtattattaatattgccaagttatccgatctaaaaaaaactatctatgcggtagatagtttttttgagccatattccacagacaatattagacatatggtaaaacgactagatggaccatctaataaatatcatatatatactgagaagttattatctgtagacgagcctagaaatcaacttattcttgataccctggtagaagaattcaagtcaggaactattaatcgaattttagttattactaaactacgtgaacatatggtattcttctacaaacgattattagattttttcggatcagaggttgtatttataggagacgcccaaaatagacgtactccagatatggtcaaatcaatcaaggaactaaatagatttatattcgtatccaccttattttattccggtactggtttagatattcctagtttggattcgttgttcatttgctcggcagtaatcaacaatatgcaaatagagcaattactagggagggtatgtcgagaaacagaactattagataggacggtatatgtatttcctaacacatccatcaaagaaataaagtacatgataggaaatttcatgcaacgaattattagtctgtctgtagataaactaggatttaaacaaaaaagttatcggaaacatcaagaatccgatcccacttctgtatgtacaacatcctccagagaagaacgtgtattaaatagaatatttaactcgcaaaatcgttaagaagtttaagcgacgatccgcatgctgcgcaggccagtgtattacccctcatagtattaatataatccaatgatacttttgtgatgtcggaaatcttaaccaatttagactgacaggcagaacacgtcatgcaatcatcatcgtcatcgataactgtagtcttgggcttctttttgcggctcttcattccggaacgcacattggtgctatccatttaggtagtaaaaaataagtcagaatatgccctatagcacgatcgtgcaaaacctggtatatcgtctctatctttatcacaatatagtgtatcgacatttttattattattgacctcgtttatcttggaacatggaatgggaacatttttgttatcaacggccatctttgccttaattccagatgttgtaaaattataactaaacagtctatcatcgacacaaatgaaattcttgtttagacgtttgtagtttacgtatgcggctcgttcgcgtctcattttttcagatattgcaggtactataatattaaaaataagaatgaaataacataggattaaaaataaagttatcatgacttctagcgctgatttaactaacttaaaagaattacttagtctgtacaaaagtttgaaattttcagattctgcggctatagaaaagtataattctttggtagaatggggaacatctacttactggaaaataggcgtgcaaaaggtagctaatgtcgagacgtcaatatctgattattatgatgaggtaaaaaataaaccgtttaatattgatccgggatattacattttcttaccggtatattttggaagcgtctttatttattcgaagggtaaaaatatggtagaacttggatctggaaactcttttcaaataccagatgatatgcgaagtgcgtgtaacaaagtattagacagcgataacggaatagactttctgagatttgttttgttaaacaatagatggataatggaagatgctatatcaaaatatcagtctccagttaatatatttaaactagctagtgagtacggattaaacatacccaaatatttagaaattgaaatagaggaagacacattatttgacgacgagttatactctattatagaacgctctttcgatgataaatttccaaaaatatccatatcgtatattaagttgggagaacttagacggcaagttgtagactttttcaaattctcgttcatgtatattgagtccatcaaggtagatcgtataggagataatatttttattcctagcgttataacaaaatcaggaaaaaagatattagtaaaagatgtagaccatttaatacgatccaaggttagagaacatacatttgtaaaagtaaaaaagaaaaacacattttccattttatacgactatgatggaaacggaacagaaactagaggagaagtaataaaacgaattatagacactataggacgagactattatgttaacggaaagtatttctctaaggttggtagtgcaggcttaaagcaattgactaataaattagatattaatgagtgcgcaactgtcgatgagttagttgatgagattaataaatccggaactgtaaaacgaaaaataaaaaaccaatcagcatttgatttaagcagagaatgtttgggatatccagaagcggattttataacgttagttaataacatgcggttcaaaatagaaaattgtaaggttgtaaatttcaatattgaaaatactaattgtttaaataacccgagtattgaaactatatatggaaactttaaccagttcgtctcaatctttaatatcgtcaccgatgtcaaaaaaagattattcgagtgaaataatatgcgcctttgatataggtgcaaaaaatcctgccagaactgttttagaagtcaaggataactccgttagggtattggatatatcaaaattagactggagttctgattgggaaaggcgcatagctaaagatttgtcacaatatgaatacactacagttcttctagaacgtcagcctagaaggtcgccgtacgtcaaatttatctattttattaaaggctttttatatcatacatcggctgccaaagttatttgcgtctcgcctgtcatgtctggtaattcatatagagatcgaaaaaagagatcggtcgaagcatttcttgattggatggacacattcggattgcgagactccgttccggatagacgcaaattagacgatgtagcggatagtttcaatttggctatgagatacgtattagataaatggaatactaattatacaccttataataggtgtaaatctagaaattacataaaaaaaatgtaataacgttagtaacgccattatggataatctatttacctttctacatgaaatagaagatagatatgccagaactatttttaactttcatctaataagttgcgatgaaataggagatatatatggtcttatgaaagaacgcatttcctcagaggatatgtttgataatatagtgtataataaagatatacatcatgccattaagaaactagtgtattgcgacatccaacttactaaacacattattaatcagaatacgtatccggtatttaacgattcttcacaagtgaaatgttgtcattatttcgacataaactcagataatagcaatattagctctcgtacagtagagatatttgagagggaaaagtcatctcttgtatcatatattaaaactaccaataagaagagaaaggtcaattacggcgaaataaagaaaactgttcatggaggcactaatgcaaattacttttccggtaaaaagtctgacgagtatctgagtactacagttagatccaacattaatcaaccttggatcaaaaccatctctaagaggatgagagttgatatcattaatcactctatagtaacgcgtggaaaaagctctatattacaaactatagaaattatttttactaatagaacatgtgtgaaaatattcaaggattctactatgcacattattctatccaaggacaaggatgaaaaggggtgtatacacatgattgacaaattattctatgtctattataatttatttctgttgttcgaggatatcatccaaaacgagtactttaaagaagtagctaatgttgtaaaccacgtacttacggctacggcattagatgagaaattattcctaattaagaaaatggctgaacacgatgtttatggagttagcaatttcaaaatagggatgtttaacctgacatttattaagtcgttggatcataccgttttcccctctctgttagatgaggatagcaaaataaagttttttaaggggaaaaagctcaatattgtagcattacgatctctggaggattgtataaattacgtgactaaatccgagaatatgatagaaatgatgaaggaaagatcgactattttaaatagcatagatatagaaacggaatcggtagatcgtctaaaagaattgcttctaaaatgaaaaaaaacactgattcagaaatggatcaacgactcggatataagtttttggtgcctgatcctaaagccggagttttttatagaccgttacatttccaatatgtatcgtattctaattttatattgcatcgattgcatgaaatcttgaccgtcaagcggccactcttatcgtttaagaataatacagaacgaattatgatagaaattagcaatgttaaagtgactcctccagattactcacctataatcgcgagtattaaaggtaagagttatgacgcattagccacgttcactgtaaatatctttaaagaggtaatgaccaaagagggtatatccatcactaaaataagtagttatgagggaaaagattctcatttgataaaaattccgctactaataggatacgggaataaaaatccacttgatacagccaagtatcttgttcctaatgtcataggtggagtctttatcaataaacaatctgtcgaaaaagtaggaattaatctagtagaaaagattacaacatggccaaaatttagggttgttaagccaaactcattcactttctcgttttcctccgtatcccctcctaatgtattaccgacaagatatcgccattacaagatatctctggatatatcacaattggaagcgtcgaatatatcatcgacaaagacatttataacggtcaatattgttttgctgtctcaatatttatctagagtgagtctagaattcattagacgtagcttatcatacgatatgcctccagaagttgtctatctagtaaacgcgataatagatagtgctaaacgaattactgaatctattactgactttaatattgatacatacattaatgacctggtggaagctgaacacattaaacaaaaatctcagttaacgatcaacgagttcaaatatgaaatgctgcataactttttacctcatatgaactatacacccgatcaactaaagggattttatatgatatctttactaagaaagtttctctactgtatctaccacacttctagatatccagatagagattcgatggtttgtcatcgtatactaacatacggcaaatattttgagacgttggcacatgatgaattagagaattacataggcaacatccgaaacgatatcatgaacaatcacaagaacagaggcacttacgcggtaaacattcatgtactaacaactcctggacttaatcatgcattttctagtctattgagtggaaagttcaaaaagtcagacggtagttatcgaacacatcctcactattcatggatgcagaatatttctattcctaggagtgttggattttatccggatcaagtaaagatttcaaagatgttttctgtcagaaaataccatccaagtcaatatctttacttttgttcatcagacgttccggaaagaggtcctcaggtaggtttagtatctcaattgtctgtcttgagttccattacaaatatactaacgtctgagtatttggatttggaaaagaaaatttgtgagtatatcagatcatattataaagatgatataagttactttgaaacaggatttccaatcactatagaaaatgctctagtcgcatctcttaatccaaatatgatatgtgattttgtaactgactttagacgtagaaaacggatgggattcttcggtaacttggaggtaggtattactttagttagggatcacatgaatgaaattcgcattaatattggagcgggaagattagtcagaccattcttggttgtggataacggagagctcatgatggatgtgtgtccggagttagaaagcagattagacgacatgacattctctgacattcagaaagagtttccgcatgtcatcgaaatggtagatatagaacaatttacttttagtaacgtatgtgaatcggttcaaaaatttagaatgatgtcaaaggatgaaagaaagcaatacgatttatgtgactttcctgccgaatttagagatggatatgtggcatcttcattagtgggaatcaatcacaattctggacccagagctattcttggatgtgctcaagctaaacaagctatctcttgtctgagctcggatatacgaaataaaatagacaatggaattcatttgatgtatccagagaggccaatcgtgattagtaaggctttagaaacttcaaagattgcggctaattgcttcggccaacatgttactatagcattaatgtcgtacaaaggtatcaatcaagaggatggaattatcatcaaaaaacaatttattcagagaggcggtctcgatattgttacagccaagaaacatcaagtagaaattccattggaaaactttaataacaaagaaagagataggtctaacgcctattcaaaattagaaagtaatggattagttagactgaatgctttcttggaatccggagacgctatggcacgaaatatctcatcaagaactcttgaagatgattttgctagagataatcagattagcttcgatgtttccgagaaatataccgatatgtacaaatctcgcgttgaacgagtacaagtagaacttactgacaaagttaaggtacgagtattaaccatgaaagaaagaagacccattctaggagacaaatttaccactagaacgagtcaaaagggaacagtcgcgtatgtcgcggatgaaacggaacttccatacgacgaaaatggtatcacaccagatgtcattattaattctacatccatcttctctagaaaaactatatctatgttgatagaggttattttaacagccgcatattctgctaagccgtacaacaataagggagaaaaccgacctgtctgttttcctagtagtaacgaaacatccatcgatacatatatgcaattcgctaaacaatgttatgagcattcaaatccgaaattgtctgatgaagaattatcggataaaatcttttgtgaaaagattctctatgatcctgaaacggataagccttatgcatccaaagtattttttggaccaatttattacttgcgtctgagacatttaactcaggacaaggcaaccgttagatgtagaggtaaaaagacgaagctcattagacaggcgaatgagggacgaaaacgtggaggaggtatcaagttcggagaaatggagagagactgtttaatagcgcatggtgcagccaatactattacagaagttttgaaagattcggaagaagattatcaagatgtgtatgtttgtgaaaattgtggagacatagcagcacaaatcaagggtattaatacatgtcttagatgttcaaaacttaatctctctcctctcttaacaaaaattgataccacacacgtatctaaagtatttcttactcaaatgaacgccagaggcgtaaaagtcaaattagatttcgaacgaagacctccttcgttttataaaccattagataaagttgatctcaaaccgtcttttctggtctaatattgtttagtagatacttatcaacatcatcaagattatcaagattatcaagattatcaagataagctaattcactaaacacattatcgatttcggtatcgttactcgcagaataaagttcgttatgatcctgatattcggaaatctgtggagtttcaggttttggtggatgtgtaacagctacttgagataccgaagtctgatattcagaaagctgtggatgttctggttcggcatccaccgatggtgttacaccactactaattggttcagtaacgtctgtggacgatggaggcaccacttctacaggttctggttctttatcctcagtcatcaacggagctacttcaatgcgaggaaatgtataatttggtaatggtttctcatgtggatctgaagaagaggtaagatatctactagaaagataccgatcacgttctagttctcttttgtagaacttaactttttctttctcagcatctagttgatattccaacctcttcacgttactacgttcagatttcaattcacgttcgcatgggttacctccgcagtttttacgagcgatttcacgttcagccttcatgcgtctctccctctctctatcgagtttatcagagcagtctttctgaaggcgatcgaactccataaatttctccaacgctttgattgtttccatagatttccgaagttcagcttttaggactgtgattctttttctttcgaattcacagctggatgtacaaccgtttccattaccgccatctctaagtttcttttctagatcggcaacatttcatccccatgccttttacattcctcgagtctactgtcgtcgaaatatcgttccagctccttttcgacatcaataactttagcacgttgtctctcaagctctcttttgtagttatctgattccctggcacgtttaagatcttcatgcaattgagtcagctcttaacacaatctcttgcttcttcgtcatagtacgcgcaatcactgtgagatccattgttaccacgtctacactcggcgagctcgcgtttaagagattcaatttcccgtttgtattggtccatgtttccattgctaccaccattagatttacaggctgctagttgtcgttcgagatcagaaatacgggttttcttggaattgatttcgtcgatgtacttggcatcgaaacacttattaagttctttttccaattctacgattttatttctttcgcgagtcaattccctcctgtagtaactatctgttttgtcagattcacgctctctacgtagactttcttgcaagttactaatttgttccctagcacgtccgagtttagttttatatgctgaatagagttctgattcatcctttgagcagatctctagcgatcgtttaagattcctgattctagtctttagcctatttacctcctcagaagatgttccgttaccgttgcgtttacactcgttaagctgtctatcaagatccatgattctatctctaagacgttgcatctctctttccatatcagcattgctttcattattacgtctgcagtcactcaactgtctttcaatatctgagattctatctctaagacgtcgcatctctctctgtttcggcattggtttcattattacgtctacagtcgttcaactgtctttcaagatctgatattctagattggagtctgctaatctctgtagcattttcacggcattcactcagttgtctttcaagatctgaaattttagattggagtctgctaatctctgtaagatttcctcctccgctctcgatgcagtcggtcaacttattctctagttctctaatacgcgaacgcagtgcatcaacttcttgcgtgtcttcctggttgcgtgtacattcatcgagtctagattcgagatctctaacgcgtcgtcgttcttcctcaagttctctgcgtactacagaaagcgtgtccctatcttgttgatatttagcaatttctgattctagagtactgattttgcttacgtagttactaatatttgtcttggccttatcaagatcctccttgtatttgtcgcattccttgatatccctacgaagtctggacagttcccattcgacattacgacgtttatcgatttcagctcggagatcgtcatcgcgttgttttagccacatacgactgagttcaagttctcgttgacaagatccatctacttttccattcctaatagtatccagttccttttctagttctgaacgcatttctcgttccctatcaagcgattctctcaattctcggatagtcttcttatcaatttctaataaatctgaaccatcatctgtcccattttgaatatccctgtgttctttgatctcttttgtaagtcggtcgattctttcggttttataaacagaatccctttccaaagtcctaatcttactgagtttatcactaagttctgcattcaattcggtgagttttctcttggcttcttccaactctgttttaaactctccactatttccgcattcttcctcgcatttatctaaccattcaattagtttattaataactagttggtaatcagcgattcctatagccgttcttgtaattgtgggaacataattaggatcttctaatggattgtatggcttgatagcatcatctttatcattattagggggatggacaaccttaattggttggtcctcatctcctccagtagcgtgtggttcttcaatagccgtgttagtaataggcttaggcaaatgcttgtcgtacgcgggcacttcctcatccatcaagtatttataatcgggttctacgtctgaatattcttttctaagagacgcaacttctggagttagtagaagaactctgtttctatatctatcaacgctggaatcaatactcaagttaaggatagcgaatacctcatcgtcatcatccgtatcctctgaaacgccatcatatgacatttcatgaagtctaacgtattgataaacagaatcagatttagtattaaacagatccttaacctttttagtaaatgcatatgtatattttagatctccagatttcataatatggtcgcatgccttaaatgtcagtgcttccataatatagtctggaacactaattggtgatgaaaaagataccggaccatatgctacgttgataaataactctgagccactaactagataatgattaatgttaaggaagaggaaatattcagtgtataggtatgtcttggcgtcatatcttgtactaaacacgctaaacagtttgttaatgtgatcaatttccaatagattaattagagcagcaggaataccaacaaacatattaccacatccgtattttctatgaatatcacatatcatgttaaaaaatcttgatagaagagcgaatatctcgtctgacttaatgagtcgtagttcagcagcaacataagtcataactgtaaatagaacatactttcctgtagtgttgattctagactccacatcaacaccattattaaaaatagttttatatacatctttaatctgctctccgttaatcgtcgaacgttctagtatacggaaacactttgatttcttatctgtagttaatgacttagtgatatcacgaagaatattacgaattacatttcttgtttttcttgagagacctgattcagaactcaactcatcgttccatagtttttttacctcagtggcgaaatctttggagtgcttggtacatttttcaataaggttcgtgacctccatttattataaaaaaattttattcaaaacttaactacaatcgggtaattataaaatcgtagatctcccatgtggtggaatactaccatctatcgcatgtggatggacagtaggtaatggccatgggaacagtaatgtttgcatatttatctttcttgccagtattactgcatattgtcccaatgtttcgatgtgatgttctaacctatcaactgccgctgtatcacaacaatagtgtccgatgaaattaagattatgatccaatgtgtttaatatatgattatcaagtcttatacgatccgcgtcttttttgacaggatcaggttcttctacaggaagaagtttcggcctcttatgatattcatgtctgggaaacggtggtctagggtgaggctccggtatcggagtgggttttggattataatcatcatcgtctatgacatcatcttcgacttcgatatttattttgctatcttgatgatgtcctgtatcagttgcattttcagcactcgactgaatattagcgcattcattgtttattattaccatatttctaaacccaaaatgtatatgttgaacatcagtactatcgttgatgagtcttatagcatgaattcgcttatcgttatcgggtttagcttctgtcaccttagcaattccttttttattaaactctacataatcatatccatttctattgtttgttctaatataaacgagtatagcatcattgctaaatttttcaatagtatcgaaaacagaatatcctaaaccatataatatatattcaggaacactcaaactaaatgtccaggattctcctaaatacgtaaactttaatagtgcgaaatcattcaaaaatctaccacttatagatagatagtacataaatgcgtatagtagtctacctatctctttattatgaaaaccggcattacgatcatatatgtcgtgatatacctgtgatccgtttacgttaaaccataaatacatgggtgatcctataaacatgaatttatttctaattctcagagctatagttaattgaccgtgtaatatttgcttacatgcatacttgatacgctcattaataagatttttatcattgctcgttatctcagaatcgtatatataaggagtaccatcgtgattcttaccagatattatacaaaatactatatataaaatatattgaccaacgttagtaatcatataaatgtttaacgttttaaattttgtattcaatgatccattatcatacgctagcatggtcttatgatattcattctttaaaatataatattgtgttagccattgcattggggctcctaatggagattttttattctcatccattttaggataggctttcataaagtccctaataacttcgtgaataatgtttctatgttttctactgatgcatgtatttgcttcgatttttttatcccatgtttcatctatcatagatttaaacgcagtaatgctcgcaacattaacatcttgaaccgttggtacaattccgttccataaatttataatgttcgccatttatataactcattttttgaatatacttttaattaacaaaagagttaagttactcatatggacgccgtccagtctgaacatcaatctttttagccagagatatcatagccgctcttagagtttcagcgtgattttccaacctaaatagaacttcatcgttgcgtttacaacacttttctatttgttcaaactttgttgttacattagtaatctttttttccaaattagttagccgttgtttgagagtttcctcattgtcgtcttcatcggctttaacaattgcttcgcgtttagcctctggctttttagcagcctttgtagaaaaaaattcagttgctggaattgcaagatcgtcatctccggggaaaagagttccgtccatttaaagtacagattttagaaactgacactctgcgttatttatatttggtacaacacatggattataaatattgatgttaataacatcagaaaatgtaaagtctatacattgttgcatcgtgttaaattttctaatggatctagtattattgggtccaacttctgcctgaaatccaaatatggaagcggatacaaaaccgtttcctggataaaccacacatctccacttttgctttacatcagaaattgtgtcattgacatcttgaactctcctatctaatgccggtgttccacctatagattttgaatattcgaatgctgcatgagtagcattaaattccttaatattgccataattttcatatattgagtaaccctggataaaaagtaaacacaccgcagccgtcgctaccacaataaaaaaaattgatagagagttcatttataatctattagaagctgacaaaatttttttacacgcatcagacaatgctttaataaatagttcaacatctacttttgtcatatcgaaccgatggtatgattctaacctagaattacatccgaaaaagttgactatgttcatagtcattaagtcattaacaaacaacattccagactctggattataagacgatactgtttcgtcacaattacctaccttaatcatgtgattatgaatattggctattagagcaccttctaagaaatctataatatctttgaaacacgatttaaaatcaaaccacgaatatacttctacgaagaaagttagtttacccataggagaaataactataaatggagatctaaatacaaaatccggatctatgatagttttaacattattatattctctattaaatacctccacatctaaaaatgttaattttgaaactatgtcttcgtttattaccgtacctgaactaaacgctataagctctattgtttgagaactctttaaacgatattcttgaaatacatgtaacaaagtttcctttaactcggtcggtttatctaccatagttacagaatttgtatccttatctataatataataatcaaaatcgtataaagttatataattatcgcgttcagattgtgatcttttcaaatagactaaaaaccccatttctctagtaagtatcttatgtatatgtttgtaaaatatcttcatggtgggaatatgctctaccgcagttagccattcctcattgacagcggtagatgtattagacaaaactattccaatgtttaacaagggccattttacgagattattaaatccttgtttgataaatgtagccaatgagggttcgagttcaacgacgattgaattctcttcccgcggatgctgcatgatgaacgacgggatgttgttcgattgatttggaattctttttcgactttttgtttatattaaatattttaaaatttatagctgatagcaattcatgtactacggataatgtagacgcgtattgcgcatcgatatctttattattagataaatttatcaataaatgtgagaagtttgcctcgttaaggtcttccatttaaatattatataaacatttgtgtttgtatcttattcgtcttttatggaatagttttttactagtaaagctgcaattacacactttgtccgtaaaacataaatataaacaccagcttttatcaatcgttccaaaaagtcgacggcggacatttttaacatggcatctattttaaatacacttaggtttttggaaaaaacatcattttataattgtaacgattcaataactaaagaaaagattaagattaaacataagggaatgtcatttgtattttataagccaaagcattctaccgttgttaaatacttgtctggaggaggtatatatcatgatgatttggttgtattggggaaggtaacaattaatgatctaaagatgatgctattttacatggatttatcatatcatggagtgacaagtagtggagcaatttacaaattgggatcgtctatcgatagactttctctaaataggactattgttacaaaagttaataattatgatgatacattttttgacgacgatgattgatcgctattgcacaattttgtttttttactttctaatatagcgtttagattctttttcatgtgcgaatattgatttactaaaatatcgatgtttaacttttgttctatgacgtccttatcagcggtatcggtacatatacgtaattcaccttcacaaaatacggagtcttcgataataatagccaatcgattattggatctagcggtctgtatcatattcaacatgtttaatatatcctttcgtttcccctttacaggcatcgatcgtagcatattttccgcgtctgagatggaaatgttaaaactacaaaaatgcgtaatgttagcccgtcctaatattggtacgtgtctataagtttggcatagtagaataatagacgtgtttaaatgccttccaaagtttaagaattctattagagtattgcattttgatagtttatcgcctacatcatcaaaaataagtaaaaagtgtgctgattttttatgattttgtgcgacagcaatacatttttctatgttacttttagttcgtatcagattatattctagagattcctgactactaacgaaattaatatgatttggccaaatgtatccatcataatctggattataaacgggtgtaaacaagaatatatgtttatattttttaactagtgtagaaaacagagatagtaaatagatagtttttccagatccagatcctcccgttaaaaccattctaaacggcatttttaataaattttctcttgaaaattgtttttcttggaaacaattcataattatatttacagttactaaattaatttgataataaatcaaaatatggaaaactaaggtcgttagtagggaggagaacaaagaaggcatatcgtgatataaataacatttattatcatgatgacaccagaaaacgacgaagagcagacatctgtgttctccgctactgtttacggagacaaaattcagggaaagaataaacgcaaacgcgtgattggtctatgtattagaatatctatggttatttcactactatctatgattaccatgtccgcgtttctcatagtgcgcctaaatcaatgcatgtctgctaacgaggctgctattactgacgccgctgttgccgttgctgctgcatcatctactcatagaaaggttgcgtctagcactacgcaatatgatcacaaagaaagctgtaatggtttatattaccagggttcttgttatatattacattcagactaccagttattctcggatgctaaagcaaattgcactgcggaatcatcaacactacccaataaatccgatgtcttgattacctggctcattgattatgttgaggatacatggggatctgatggtaatccaattacaaaaactacatccgattatcaagattctgatatatcacaagaagttagaaagtatttttgtgttaaaacaatgaactaatatttatttttgtacattaataaatgaaatcgcttaatagacaaactgtaagtaggtttaagaagttgtcggtgccggccgctataatgatgatactctcaaccattattagtggcataggaacatttctgcattacaaagaagaactgatgcctagtgcttgcgccaatggatggatacaatacgataaacattgttatctagataccaacattaaaatgtctacagataatgcggtttatcagtgtcgtaaattacgagctagattgcctagacctgatactagacatctgagagtattgtttagtattttttataaagattattgggtaagtttaaaaaagaccaataataaatggttagatattaataatgataaagatatagatattagtaaattaacaaattttaaacaactaaacagtacgacggatgctgaagcgtgttatatatacaagtctggaaaactggttgaaacagtatgtaaaagtactcaatctgtactatgtgttaaaaaattctacaagtgacaacaaaaaatgaattaataataagtcgttaacgtacgccgccatggacgccgcgtttgttattactccaatgggtgttgactataacagatacattgtatgatgatctcgatatctcaatcatggactttataggaccatacattataggtaacataaaaactgtccaaatagatgtacgggatataaaatattccgacatgcaaaaatgctactttagctataagggtaaaatagttcctcaggattctaatgatttggctagattcaacatttatagcatttgtgccgcatacagatcaaaaaataccatcatcatagcatgcgactatgatatcatgttagatatagaagataaacatcagccattttatctattcccatctattgatgtttttaacgctacaatcatagaagcgtataacctgtatacagctggagattatcatctaatcatcaatccttcagataatctgaaaatgaaattgtcgtttaattcttcattctgcatatcagacggcaatggatggatcataattgatgggaaatgcaatagtaattttttatcataaaagttgtaaagtaaataataaaacaataaatattgaactagtagtacgtatattgagcaatcagaaatgatgctggtacctcttatcacggtgaccgtagttgcgggaacaatattagtatgttatatattatatatttgtaggaaaaagatacgtactgtctataatgacaataaaattatcatgacaaaattaaaaaagataaagagttctaattccagcaaatctagtaaatcaactgatagcgaatcagactgggaggatcactgtagtgctatggaacaaaacaatgacgtagataatatttctaggaatgagatattggacgatgatagcttcgctggtagtttaatatgggataacgaatccaatgttatggcgcctagcacagaacacatttacgatagtgttgctggaagcacgctgctaataaataatgatcgtaatgaacagactatttatcagaacactacagtagtaattaatgaaacggagactgttaaagtacttaatgaagataccaaacagaatcctaactattcatccaatcctttcgtaaattataataaaaccagtatttgtagcaagtcaaatccgtttattacagaacttaacaataaatttagtgagaataatccgtttagacgagcacatagcgatgattatcttaataagcaagaacaagatcatgaacacgatgatatagaatcatcggtcgtatcattggtgtgattagtttcctttttataaaattgaagtaatatttagtattattgctgccgtcacgttgtacaaatggagatattccctgtattcggcatttctaaaattagcaattttattgctaataatgactgtagatattatatagatacagaacatcaaaaaattatatctgatgagatcaatagacagatggatgaaacggtacttcttaccaacatcttaagcgtagaagttgtaaatgacaatgagatgtaccatcttattcctcatagattatcgacgattatactctgtattagttctgtcggaggatgtgttatctctatagataatgacgtcaatggcaaaaatattctaacctttcccattgatcatgctgtaatcatatccccactgagtaaatgtgtcgtagttagcaagggccctacaaccatactggttgctaaagcggatatacccagcaaacgattggtaacatcgtttacaaacgacatactgtatgtaaacaatctatcactgattaattatttgccgttgtctgtattcattattagacgagtcaccgactatttggatagacacatatgcgatcagatatttgctaataataagtggtattcccttataaccatcgacgataagcaatatcctattccatcaaattgtataggtatgtcttctgccaagtacataaattctagcatcgagcaagatactttaatacatgtttgtaacctcgagcatccattcgacttagtatacaaaaaaatgcagtcgtacaattctgtacctatcaaggaacaaatattgtacggtagaattgataatataaatatgagcattagtatttctgtggattaatagatttctagtatggggatcattaatcatctctaatctctaaatacctcataaaacgaaaaaaaagctattatcaaatactgtacggaatagattcattctcttctctttttatgaaactctgttgtatatctactgataaaactggaagcaaaaaatctgataaaaagaataagatcaagatcaaggattatatggaacacgattattataaaataacaatagttcctggttcctcttccacgtctactagctcgtggtattatacacatgcctagtaatagtctctttgcgttgatggaaagcagactagaaataacaggctaaaatgttcagacaccataatagttcccaacccagataataacagagtaccatcaacacattcctttaaactcaatcccaaacccaaaaccgttaaaatgtatccggccaattgatagtagataatgaggtgtacagcgcatgataatttacacagtaaccaaaatgaaaatactttagtaattataagaaatatagatggtaacgtcatcatcaacaatccaataatatgccggagagtaaacattgacggataaaacaaaaatgctccgcataactctatcatggcaataacacaaccaaatacttgtaagattcctaaattagtagaaaatacaacggatatcgatgtataagtgatctcgagaaataataagaataaagtaatgcccgtaaagataaacatcaacattgtttggtaatcattaaaccaattagtatgacgttgaactaatttcacagtaaattttattccagtattatccccgcatgtataagtacctggtaagatatctttatattccataatcaatgagacatcactatctgataacgaatgaagtctagcactagtatgccatttacttaatattgtcgtcttggaagttttattataagttaaaatatcatggttatccaatttccatctaatatactttgtcggattatctatagtacacggaataatgatggtatcattacatgctgtatactctatggtctttgtagttgttataacaaccaacgtatagaggtatatcaacgatattctaactcttgacattttttatttatttaaaatgatacctttgttatttattttattctattttgctaacggtattgaatggcataagtttgaaacgagtgaagaaataatttctacttacttattagacgacgtattatacacgggtgttaatggggcggtatacacattttcaaataataaactaaacaaaactggtttaactaataataattatataacaacatctataaaagtagaggatgcggataaggatacattagtatgcggaaccaataacggaaatcccaaatgttggaaaatagacggttcagacgacccaaaacatagaggtagaggatacgctccttatcaaaatagcaaagtaacgataatcagtcacaacggatgtgtactatctgacataaacatatcaaaagaaggaattaaacgatggagaagatttgacggaccatgtggttatgatttattcacggcggataacgtaattccaaaagatggtttacgaggagcattcgtcgataaagacggtacttatgacaaagtttacattcttttcactgatactatcggctcaaagagaattgttaaaattccgtatatagcacaaatgtgcctaaacgacgaaggtggtccatcatcgttgtctagtcatagatggtcgacgtttctcaaagtcgaattagaatgtgatatcgacggaagaagttatagataaattattcattctaaaactataaaaacagataatgatacgatactatatgtattcttcgatagtccgcattatgtacctattctatgaataccattaaacaatctttttctacgtcaaaattggaaggatatacaaagcaattgccgtctccagctcctggtatatgtctaccagctggaaaagttgttccacataccacgtttgaagtcatagaaaaatataatgtactagatgatattataaagcctttatctaaccaacctatcttcgaaggaccgtctggtgttaaatggttcgatataaaggagaaggaaaatgaacatcgggaatatagaatatacttcataaaagaaaattctatatattcgttcgatacaaaatctaaacaaactcgtagctcgcaagtcgatgcgcgactattttcagtaatggtaacttcgaaaccgttatttatagcagatatagggataggagtaggaatgccacaaatgaaaaaaatacttaaaatgtaatcttaatcgagtacaccacacgacaatgaacaaacataagacagattatgctggttatgcttgctgcgtaatatgcggtctaattgttggaattatttttacagcgacactattaaaagttgtagaacgtaaattagttcatacaccatcaatagataaaacgataaaagatgcatatattagagaagattgtcctactgactggataagctataataataaatgtatccatttatctactgatcgaaaaaacctgggaggaaggacgtaatgcatgcaaagctctaaatccaaattcggatctaattaagatagagactccaaacgagttaagttttttaagaagccttagacgaggctattgggtaggagaatccgaaatattaaaccagacaaccccatataattttatagctaaaaatgccacgaagaatggaactaaaaaacggaaatatatttgtagtacaacgaatactcccaaactgcattcgtgttacactatataacaattacactacatttttatcataacactacttcggttagatgttttagaaaaaaataaatatcgccgtaccgttcttgtttttataaaaataacaattaacaattatcaaattttttctttaatattttacgtggttgaccattcttggtggtaaaataatctcttagtgttggaatggaatgctgtttaatgtttccgcactcatcgtatattttgacgtatgcagtcacatcgtttacgcaatagtcagactgtagttctatcatgcttcctacatcagaaggaggaacagttttaaagtctcttggttttaatctattgccattagttttcatgaaatcctttgttttatccacttcacattttaaataaatgtccactatacattcttctgttaattttactagatcgtcatgggtcatagaatttataggttccgtagtccatggatccaaactagcaaacttcgcgtatacggtatcgcgattagtgtatacaccaactgtatgaaaattaagaaaacagtttaataaatcaacagaaatatttaatcctccgtttgatacagatgcgccatatttatggatttcggattcacacgttgtttgtctgaggtgttcgtctagtgttgcttctacgtaaacttcgattcccatatattctttattgtcagaatcgcataccgatttatcatcatacactgtttgaaaactaaatggtatacacatcaaaataataaataataacgagtacattctgcaatattgttatcgtaattggaaaattagtgttcgagtgagtcggattatgtgagtactggattgtatattttattttatattttgtaataagaataaaatgctaatgtcaagtttattccaatagatgtcttattaaaaaacatatataataaataacaatggctgaatggcataaaattatcgaggatatctcaaaaaataataagttcgaggatgccgccatcgttgattacaagactacaaagaatgttctagctgctattcctaacagaacatttgccaagattaatccgggtgaaattattcctctcatcactaatcgtaatattctaaaacctcttattggtcagaaatattgtattgtatatactaactctctaatggatgagaacacgtatgctatggagttgcttactgggtacgcccctgtatctccgatcgttatagcgagaactcataccgcacttatatttttgatgggtaagccaacaacatccagacgtgatgtgtatagaacgtgtagagatcacgctacccgtgtacgcgcaactggtaattaaaataaaaagtaatattcatatgtagtgtcaattttaaatgatgatgatgaaatggataatatccatattgacgatgtcaataatgccggtattggcatacagctcatcgatttttagatttcattcagaggatgtggaattatgttatgggcatttgtattttgataggatctataatgtagtaaatataaaatataatccgcatattccatatagatataattttattaatcgcacgttaaccgtagatgaactagacgataatgtcttttttacacatggttattttttaaaacacaaatatggttcacttaatcctagtttgattgtctcattatcaggaaacttaaaatataatgatatacaatgctcagtaaatgtatcgtgtctcattaaaaatttggcaacgagtacatctactatattaacatctaaacataagacttattctctacatcggtccacgtgtattactataataggatacgattctattatatggtataaagatataaatgacaagtataatgacatctatgattttactgcaatatgtatgctaatagcgtctacattgatagtgaccatatacgtgtttaaaaaaataaaaatgaactcttaattatgctatgctattagaaatggataaaatcaaaattacggttgattcaaaaattggtaatgttgttaccatatcgtataacttggaaaagataactattgatgttacacctaaaaagaaaaaagaaaaggatgtattattagcgcaatcagttgctgtcgaagaggcaaaagatgtcaaggtagaagaaaaaaatattatcgatattgaagatgacgatgatatggatgtagaaagcgcataatacgatctataaaaataagtatataataaatactttttatttacggtactcttgtagtggtgataccctactcaattatttttttaaaaaaatacttattctgattcttctagccatttccgtgttcgttcgaatgccacatcgacgttaaagataggggagtagttgaaatctagttctgcattgttggtacgcacctcaaatgtagtgttggatatcttcaacgtatagttgttgagtagtgatggttttctaaatagaattctcttcatatcattcttgcacgcgtacatttttagcatccatcttggaattctagatccttgttctattcccaatggtttcatcaatagaagattaaacatatcgtacgaacacgatggagagtaatcgtagcaaaagtaagcatttcctttaatcttagatcccggatactggatatattttgcagccaacacgtgcatccatgcagcatttcctacatatacccggctatgcaccgcgtcatcatcgactgtacgatacataatgttaccgtgttgcttacattgctcgtaaaagactttcgtcaatttgtctccttctccgtaaattccagtgggtcttaggcaacaagtatacaattttgctccattcatgattacggaattattggctttcataaccagttgctcggccatacgtttactttttgcgtatacatgtcctggtgatatatcataaagggtatgctcatggccgatgaatggatcaccgtgtttattgggtcctattgcttccatgctactagtatagatcaaatacttgattcctaggtccacacaagctgccaatatagtctgtgttccataatagtttactttcatgatttcattatcggtgtattttccaaatacatccactagagcagccgtatgaataatcagatttaccccatctagcgcttctctcaccttatcaaagtcgtttatatcacattgtatatagtttataaccttaactttcgaggttattggttgtggatcttctacaatatctatgactctgatttcttgaacatcatctgcactaattaacagttttactatatacctgcctagaaatccggcaccaccagtaaccgcgtacacggccattgctgccactcataatatcagactacttattctattttactaaataatggctgtttgtataatagaccacgataatatcagaggagttatttactttgaaccagtccatggaaaagataaagttttaggatcagttattggattaaaatccggaacgtatagtttgataattcatcgttacggagatattagtcaaggatgtgattccataggcagtccagaaatatttatcggtaacatctttgtaaacagatatggtgtagcatatgtttatttagatacagatgtaaatatatttacaattattggaaaggcgttatctatttcaaaaaatgatcagagattagcgtgtggagttattggtatttcttacataaatgaaaagataatacattttcttacaattaacgagaatggcgtttgatatatcagttaatgcgtctaaaacaataaatgcattagtttacttttctactcagcaaaataaattagtcatacgtaatgaagttaatgatacacactacactgtcgaatttgatagggacaaagtagttgacacgtttatttcatataatagacataatgacaccatagagataagaggggtgcttccagaggaaactaatattggttgcgcggttaatacgccggttagtatgacttacttgtataataagtatagttttaaactgattttagcagaatatataagacacagaaatactatatccggcaatatttattcggcattgatgacactagatgatttggctattaaacagtatggagacattgatctattatttaatgagaaacttaaagtagactccgattcgggactatttgactttgtcaactttgtaaaggatatgatatgttgtgattctagaatagtagtagctctatctagtctagtatctaaacattgggaattgacaaataaaaagtataggtgtatggcattagccgaacatatatctgatagtattccaatatctgagctatctagactacgatacaatctatgtaagtatctacgcggacacactgagagcatagaggatgaatttgattattttgaagacgatgattcgtctacatgttctgccgtaaccgacagggaaacggatgtataattttttttatagcgtgaaggatatgataaaaaatataattgttgtatttatcccattccaatcaccttatatgattctgtaaaaaaattatactgtaacacaataaaggagtcttatagatgtatagaggtcagatactggtttgataaactgtttattccacataagtatgtttgactttatggttagacccgcatactttaacaaatcactgaaaattggagttaggtattgacctctcagaatcagttgccgttctggaacattaaatgtattttttatgatatactccaacgcatttatgtgggcatacaacaagtcattactaatggagtattccaagagttttagttgtctagtatttaacaagagaagagatttcaacagactgtttatgaactcgaacgccgcctcattgtcgcttatattgatgatgtcgaattctcccaatatcatcactgatgagtagctcatcttgttatcgggatccaagttttctaaagatgtcattaaaccctcgatcatgaatggatttatcatcatcgtttttatgttggacatgagcttagtccgtttgtccacatctatagacgacgatttctgaattatttcatatatccctctctttaactccaggaacttgtcaggatggtctactttaatatgttctcgtctaagagatgaaaatctttggatggttgcacgcgacttttctttaaaggatgacgttgcccaagatcctctcttaaatgaatccatcttatccttggacaagatggacagtctattttccttagatggtttaatatttttgttacccatgatctataaaggtagacctaatcgtctcggatgaccatatatttattttcagttttattatacgcataaattgtaaaaaatatgttaggtttacaaaaatgtctcgtggggcattaatcgtttttgaaggattggacaaatctggaaaaacaacacaatgtatgaacatcatggaatctataccggcaaacacgataaaatatcttaactttcctcagagatccactgtcactggaaagatgatagatgactatctaactcgtaaaaaaacctataatgatcatatagttaatctattattttgtgcaaatagatgggagtttgcatcttttatacaagaacaactagaacagggaattactttaatagttgatagatacgcattttctggagtagcgtatgccgccgctaaaggcgcgtcaatgactctcagtaagagttatgaatctggattgcctaaacccgacttagttatattcttggaatctggtagcaaagaaattaatagaaacgtcggcgaggaaatttatgaagatgttacattccaacaaaaggtattacaagaatataaaaaaatgattgaagaaggagatattcattggcaaattatttcttctgaattcgaggaagatgtaaagaaggagttgattaagaatatagttatagaggctatacacacggttactggaccagtggggcaactgtggatgtaatagtgaaattacattttttataaatagatgttagtacagtgttataaatggatgaagcatattactctggcaacttggaatcagtactcggatacgtgtccgatatgcataccgaactcgcatcaatatctcaattagttattgccaagatagaaactatagataatgatatattaaacaaggacattgtaaattttatcatgtgtagatcaaacttggataatccatttatctctttcctagatactgtatatactattatagatcaagagatctatcagaccgaattgattaattcattagacgacaatgaaattatcgattgtatagttaacaagtttatgagcttttataaggataacctagaaaatatagtagatgctatcattactctaaaatatataatgaataatccagattttaaaactacgtatgccgaagtactcggttccagaatagccgatatagatattaaacaagtgatacgtaagaatatactacaattgtctaatgatatccgcgaacgatatttgtgaaaaatattaaaaaaaaatactttttttattaaatgacgtcgcttcgcgaatttagaaaattatgctgtgatatatatcacgcatcaggatataaagaaaaatctaaattaattagagactttataacagatagggatgataaatatttgatcattaagctattgcttcccggattagacgatagaatttataacatgaacgataaacaaattataaaattatatagtataatatttaaacaatctcaggaagatatgctacaagatttaggatacggatatataggagacactattaggactttcttcaaagagaacacagaaatccgtccacgagataaaagcattttaactttagaagaagtggatagttttttaactacgttatcatccgtaactaaagaatcgcatcaaataaaattattgactgatgtagcatctgtttgtacatgtaatgatttaaaatgtgtagtcatgcttattgataaagatctaaaaattaaagcgggccctcggtacgtacttaacgctattagtcctcatgcctatgatgtgtttagaaaatctaataacttgaaagagataatagaaaatgcatctaaacaaaatctagactctatatctatttctgttatgactccaattaatcccatgttagcggaatcgtgtgattctgtcaataaggcgtttaaaaaatttccatcaggaatgtttgcggaagtcaaatacgatggtgaaagagtacaagttcataaaaataataacgagtttgccttctttagtagaaacatgaaaccagtactctctcataaagtggattatctcaaagaatacataccgaaagcatttaaaaaagctacgtctatcgtattggattctgaaattgttcttgtagacgaacataatgtaccgctaccgtttggaagtttaggaatacacaaaaagaaagaatataaaaactctaacatgtgtttgttcgtgtttgactgtttgtactttgatggattcgatatgacggacattccattgtacgaacgaagatcttttctcaaagatgttatggttgaaatacccaatagaatagtattctcagagttgacgaatattagtaacgagtctcagttaactgacgtattggatgatgcactaacgagaaaattagaaggattggtcttaaaagatattaatggagtatacgaaccgggaaagagaagatggttaaaaataaagcgagactatttgaacgagggttccatggcagattctgccgatttagtagtactaggtgcctactatggtaaaggagcaaagggtggtatcatggcagtctttctaatgggttgttacgacgatgaatccggtaaatggaagacggttaccaagtgttcaggacacgatgataatacgttaagggagttgcaagaccaattaaagatgattaaaattaacaaggatcccaaaaaaattccagagtggttagtagttaataaaatctatattcccgattttgtagtagaggatccgaaacaatctcagatatgggaaatttcaggagcagagtttacatcttccaagtcccataccgcaaatggaatatccattagatttcctagatttactaggataagagaggataaaacgtggaaagaatctactcatctaaacgatttagtaaacttgactaaatcttaatagttacatacaaactgaaaattaaaataacaccatttagttggtggtcgccatggatggtgttattgtatactgtctaaacgcgttagtaaaacatggcgaggaaataaatcatataaaaaatgatttcatgattaaaccatgttgtgaaagagtttgtgaaaaagtcaagaacgttcacattggcggacaatctaaaaacaatacagtgattgcagatttgccatatatggataatgcggtatccgatgtatgcaattcactgtataaaaagaatgtatcaagaatatccagatttgctaatttgataaagatagatgacgatgacaagactcctactggtgtatataattattttaaacctaaagatgttattcctgttatcatatctataggaaaggataaagatgtctgtgaactattaatctcatcagacatatcgtgtgcatgcgtggagttaaattcatatcacgtagccattcttcccatgaatgtttccttttttaccaaaggaaatgcctcgttgattattctcctgtttgatttctctatcgatgcagcacctctcttaagaagtgtaaccgataataatgttattatatctagacaccagcgtctacatgacgagcttccgagttccaattggttcaagttttacataagtataaagtccgactattgttctatattatatatggttgttgatggatctgtgatgcatgcgatagctgataatagaactcacgcaattattagcaaaaatatattagacaatactacaattaacgatgagtgtagatgctgttattttgaaccacagattaggattcttgatagagatgagatgctcaatggatcatcgtgtgatatgaacagacattgtattatgatgaatttacctgatgtaggcgaatttggatctagtatgttggggaaatatgaacctgacatgattaagattgctctttcggtggctggtaatttaataagaaatcgagactacattcccgggagacgaggctatagctactacgtttacggtatagcctctagataatttttttaagcacgaaataaaaaacataattttaaaccaatctatttcatactattttgtgtgatcaccatggacataaagatagatattagtatttctggtgataaatttacggtgactactaggagggaaaatgaagaaagaaaaaaatatctacctctccaaaaagaaaaaactactgatgttatcaaacctgattatcttgagtacgatgacttgttagatagagatgagatgtttactattctagaggaatattttatgtacagaggtctattaggcctcagaataaaatatggacgactctttaacgaaattaaaaaattcgacaatgatgcggaagaacaattcggtactatagaagaactcaagcagaaacttagattaaattctgaagagggagcagataactttatagattatataaaggtacaaaaacaggatatcgtcaaacttactgtatacgattgcatatctatgataggattgtgtgcatgcgtggtagatgtttggagaaatgagaaactgttttctagatggaaatattgtttacgagcgattaaactgtttattaatgatcacatgcttgataagataaaatctatactgcagaatagactagtatatgtggaaatgtcatagaaagttaatgagagcaaaaatatataaggttgtattccatatttgttattttttctgtaatagttaaaaaaatacattcgatggtctatctatcagattattatgtgttataaggtactttttctcataataaactagagtatgagtaagatagtgtttttcaaaacatataaatctaaaattgatggatgagatatacagctattaatttcgaaaatatataaatctaaaattgatggataagatatacagctattaatttcgaaaatatattttaatctgataactttaaacatggatttttgatggtggtttaacgttttaaaaaaagattttgttattgtagtatatgataatattaaaagatggatataaagaatttgctgactgcatgtactattttttacattactacattggctacggcagatatacctactccgccaccaacgggtcatgtgacaagggagaatatcttgataagaggcataatcaatgttgtaatcggtgtccacctggagaatttgccaaggttagatgtaatggtaacgataacacaaaatgtgaacgctgcccacctcatacatataccacaatccccaattattctaatggatgtcatcaatgtagaaaatgcccaaccggatcatttgataaggtaaagtgtaccggaacacagaacagtaaatgttcgtgtcttcctggttggtattgcgctactgattcttcacagactgaagattgttgaaattgtgtaccaaaaaggagatgtccatgcggatactttggtggaatagatgaacaaggaaatcctatttgtaaatcgtgctgtattggtgaatattgcaactacctacgtaattatagacttgatccattttctccatgcaaactatctaaatgtaattaattatgattttgatgataatgttaccatacattatatcgctacttggttagtgtattattcagtatgaagacctattaataattacttatcttttgacgatcttgttataattataatataaaaacttatggcatagtaactcataattgctgacgcgataaattcgtaataatctgttttgttcaaatttttataaggaatctacaggcataaaaataaaaatataatttataatatactcttacagcgcgccatcatgaatagcagcagtaaattaattgctgttattaatggatttagaaatagtggacgattttgtgatattaatatagttattaatgatgaaaggataaacgctcacagactcatcctatctggagcctccgaatatttttccattctgttttccaataattttatcgattctaatgaatacgaagttaatctaagtcatttagattatcaaagtgttaacgatttgatcgattacatttatgggatacctttgagcctaactaacgataacgtgaaatatattctttcaaccgctgattttttacaaattggatctgccattactgagtgcgaaaaatacatacttaaaaatctttgttctagaaactgtatcgatttctacatatacgctgataaatataataacaagaaaatagaatcagcgtcgtttaacacaatattacgaaatattttgagactcatcaacgatgaaaactttaaatacttaacagaggaatcaatgataaaaattttaagcgatgatatgttaaatataaaaaatgaggattttgcaccactaattctcattaaatggttagagagtactcaacaatcatgcaccgtcgagttacttagatgcctcagaatatcattgctttccccacaagttataaaatcactttatagtcatcaactggttagttcaatctacgaatgtataacattcttaaacaatatagcattcttggatgaatcatttcctagataccatagcatcgagttgatatctatcggtataagtaattcgcatgataagatttccataaactgctacaatcataaaaaaaatacatgggaaatgatatcttcacgtagatataggtgtagtttcgcagtggccgtcctggataatattatctatatgatgggtggatatgatcagtccccgtatagaagttcaaaggttatagcgtacaatacatgtacaaattcttggatatatgatataccagagctaaaatatcctcgttctaattgtgggggactggctgatgacgaatacatttattgtataggcggcatacgcgatcaggattcatcgttgacatctagtattgatagatggaagccatcaaaaccatattggcagaagtatgctaaaatgcgcgaaccaaaatgtgatatgggggttgcgatgttaaacggattaatatatgtcatgggtggaatcgttaaaggtgacacgtgtaccgacgcactagagagtttatcagaagatggatggatgaagcatcaacgtcttccaataaaaatgtccaatatgtcgacgattgttcatgatggcaagatttatatatctggaggttacaacaatagtagtgtagttaatgtaatatcgaatctagtccttagctataatccgatatatgatgaatggaccaaattatcatcattaaacattcctagaattaatcccgctctatggtcagcgcataataaattatatgtaggaggaggaatatctgatgatgttcgaactaatacatctgaaacatacgataaagaaaaagattgttggacattggataatggtcacgtgttaccacgcaattatataatgtataaatgcgaaccgattaaacataaatatccattggaaaaaacacagtacacgaatgattttctaaagtatttggaaagttttataggtagttgatagaacaaaatacataattttgtaaaaataaatcactttttatactaatatgacacgattaccaatacttttgttactaatatcattagtatacgctacaccttttcctcagacatctaaaaaaataggtgatgatgcaactctatcatgtaatcgaaataatacaaatgactacgttgttatgagtgcttggtataaggagcccaattccattattcttttagctgctaaaagcgacgtcttgtattttgataattataccaaggataaaatatcttacgactctccatacgatgatctagttacaactatcacaattaaatcattgactgctagagatgccggtacttatgtatgtgcattctttatgacatcaactacaaatgacactgataaagtagattatgaagaatactccacagagttgattgtaaatacagatagtgaatcgactatagacataatactatctggatctacacattcaccagaaactagttctgagaaaccagaggatatagataattttaattgctcgtcggtattcgaaatcgcgactccggaaccaattactgataatgtagaagatcatacagacaccgtcacatacactagtgatagcattaatacagtaagtgcatcatctggagaatccacaacagacgagactccggaaccaattactgataaagaagaagatcatacagtcacagacactgtctcatacactacagtaagtacatcatctggaattgtcactactaaatcaaccaccgatgatgcggatctttatgatacgtacaatgataatgatacagtaccaccaactactgtaggcggtagtacaacctctattagcaattataaaaccaaggactttgtagaaatatttggtattaccgcattaattatattgtcggccgtggcaatattctgtattacatattatatatataataaacgttcacgtaaatacaaaacagagaacaaagtctagatttttgacttacataaatgtctgggatagtaaaatctatcatattgagcggaccatctggttcaggaaagacagccatagccaaaagactatgggaatatatttggatttgtggtgtcccataccactagatttcctcgtcctatggaacgagaaggtgtcgattaccattacgttaacagagaggccatctggaagggaatagccgccggaaactttctagaacatactgagtttttaggaaatatttacggaacttctaaaactgctgtgaatacagcggctattaataatcgtatttgtgtgatggatctaaacatcgatggcgttagaagtcttaaaaatacgtacctaatgccttactcggtgtatataagacctacctctcttaaaatggttgagaccaagcttcgttgtagaaacactgaagcggatgatgagattcatcgtcgtgtgatgttggcaaaaactgacatggatgaggcaggtgaagccggtctattcgacactattatcattgaagatgatgtgaatttagcatatagtaagttaattcagatactacaggaccgtattagaatgtattttaacactaattagagacttaagacttaaaacttgataattaataatataactcgtttttatatgtggctatttcaacgtctaatgtattagttaaatattaaaacttaccacgtaaaacttaaaatttaaaatgatatttcattgacagatagatcacacattatgaactttcaaggacttgtgttaactgacaattgcaaaaatcaatgggtcgttggaccattaataggaaaaggtggattcggtagtatttatactactaatgacaataattatgtagtaaaaatagagcccaaagctaacggatcattatttaccgaacaggcattttatactagagtacttaaaccatccgttatcgaagaatggaaaaaatctcacaatataaagcacgtaggtcttatcacgtgcaaggcatttggtctatacaaatccattaatgtggaatatcgattcttggtaattaatagattaggtgcagatctagatgcggtgatcagagccaataataatagattaccaaaaaggtcggtgatgttgatcggaatcgaaatcttaaataccatacaatttatgcacgagcaaggatattctcacggagatattaaagcgagtaatatagtcttggatcaaatagataagaataaattatatctagtggattacggattggtttctaaattcatgtctaatggcgaacatgttccatttataagaaatccaaataaaatggataacggtactctagaatttacacctatagattcgcataaaggatacgttgtatctagacgtggagatctagaaacacttggatattgtatgattagatggttgggaggtatcttgccatggactaagatatctgaaacaaagaattgtgcattagtaagtgccacaaaacagaaatatgttaacaatactgcgactttgttaatgaccagtttgcaatatgcacctagagaattgctgcaatatattaccatggtaaactctttgacatattttgaggaacccaattacgacgagtttcggcacatattaatgcagggtgtatattattaagtgtggtgtttggtcgatgtaaaatttttgtcgataaaaattaaaaaataacttaatttattattgatctcgtgtgtacaaccgaaatcatggcgatgttttacgcacacgctctcggtgggtacgacgagaatcttcatgcctttcctggtaccaaaaattgaaaaactagcgtctttttttgctcgactgcagaccatggagacacccaagcctaggatactgccctggctcgtgagccagctcgatctcggccaactcgaaggtgtcgcttggttggacgagtcaaggacaagattcagaataccctggaagcatggcctgagacaggatgctcagatggccgattttggtatttttcaagcttgggccgaagcttctggtgcttacacccccggcaaggataaacctgatgtgtccacttggaaacggaatttccggtctgccttgaaccggaaggaagtgttgcgcctcgccgcagataactctaaagatccttacgaccctcacaaagtttatgagtttgttactcccggggcaagagattttgtgcatcttggggcttcacccgatactaatggaaaaagtagtcttccccacagtcaggagaatcttcccaaactttttgatgggcttattctcgggcccttgaaggatgaggggagttccgatttggcaatagtctctgacccaagccagcaactgccatcaccaaacgtcaacaattttctcaatccagccccccaagagaacccccttaaacagcttcttgccgaggagcaatgggagttcgaagttactgccttctatcgcgggaggcaggtattccaacaaaccttgttttgtccaggaggcttgagactcgtgggcagcactgctgatatgactctgccctggcagccagtgaccctccccgaccctgaagggttcctgactgacaaactcgtgaaggagtacgtgggacaagtactgaagggcctgggaaatggtcttgccctctggcaagctggacagtgcttgtgggctcaacgccttggacattcacacgcattttgggccctcggggaggagcttcttcctgacagtggccgcggaccagatggcgaggtacataaggataaagatggtgcagtcttcgacctcagaccatttgtcgcagaccttatcgccttcatggaaggttccggtcacagccctagatatacactttggttctgtatgggggaaatgtggccacaagatcaaccttgggtcaagcgccttgttatggtaaaggtggtccctacatgtttgaaagagctgctcgaaatggctcgggaaggaggagcctcttctttgaaaactgtagacctgcacatatctaacagccaaccaatcagcctgacctccgatcagtacaaagcttaccttcaagaccttgtcgaggacatggacttccaagccacaggcaacatttgattaattaatttttatgagctcctggtaaaagttaaacttggggagaatgatacagaaaatctttcttctactatatcggcggcaccatcgaggtaaccacctctcaagaagaccgcgtgaataatgtactcatgaaacgtttggaaactatacgccatatgtggtctgttgtatatgatcattttgatattgtgaatggtaaagaatgctgttatgtgcatacgcattcatctaatcaaaatcctataccgagtactgtaaaaacaaatttgtacatgaagactatgggatcatgcattcaaatggattccatggaagctctagagtatcttagcgaactgaaggaatcaggtggatggagtcccagaccagaaatgcaggaatttgaatatccagatggagtggaagacactgaatcaattgagagattggtagaggagttcttcaatagatcagaacttcaggctggtaaattagtcaaatttggtaattctattaattgttaaacatacatctgtttcagctaagcaactaagaacacgtatacggcagcagcttccttttatactctcatcttttaccaacacaaagggtggatatttgttcattggagttgataataatacacacaaagtatttggattcacggtgggttacgactacctcagactgatagagaatgatatagaaaagcatatcaaaagactttgtgttgtgcatttctgtgagaagaaagaggacatcaagtacacgtgtcgattcatcaaggtatataaacctggggatgaggctacctcgacatacgtgtgcgctatcaaagtggaaagatgctgttgtgctgtgtttgcagattggccagaatcatggtatatggatactaatggtatcaagaagtattctccagatgaatgggtgtcacatataaaattttaattaatgtaactatagagaacaaataataggttgtaatatcatatagacaataactaacaattaattagtaactgttatctcttttttaactaaccaactaactatatacctattaatacatcgtaattatagttcttaacatctattaatcattgattcgcttctttaattttttataaactaacattgttaattgaaaagggataacatgttacagaatataaattatatatggatttttttaaaaaggaaatacttgactggagtgtatatttatctcttcattatatagcacgcgtgtgttccaattcttccacatcccatataatacaggattataatctcgttcgaacatacgagaaagtggataaaacaatagttgattttttatctaggttgccaaatttattccatattttagaatatggggaaaatattctacatatttattctatggatgatgctaatacgaatattataattttttttctagatagagtattaaatattaataagaacgggtcatttatacacaatctcaggttatcatcatccattaatataaaagaatatgtatatcaattagttaataatgatcatccagataataggataagactaatgcttgaaaatggacgtagaacaagacattttttgtcctatatatcagatacagttaatatctatatatgtattttaataaatcatggattttatatagatgcagaagacagttacggttgtacattattacatagatgtatatatcactataagaaatcagaatcagaatcatacaatgaattaattaagatattgttaaataatggatccgatgtagataaaaaagatacgtacggaaacacaccttttatcctattatgtaaacacgatatcaacaacgtggaattgtttgagatatgtttagagaatgctaatatagactctgtagactttaatagatatacacctcttcattatgtctcatgtcgtaataaatatgattttgtaaagttattaatttctaaaggagcaaatgttaatgcgcgtaataaattcggaactactccattttattgtggaattatacacggtatctcgcttataaaactatatttggaatcagacacagagttagaaatagataatgaacatatagttcgtcatttaataatttttgatgctgttgaatctttagattatctattatccagaggagttattgatattaactatcgtactatatacaacgaaacatctatttacgacgctgtcagttataatgcgtataatacgttggtctatctattaaacagaaatggtgattttgagacgattactactagtggatgtacatgtatttcggaagcagtcgcaaacaacaacaaaataataatggaagtactattgtctaaacgaccatctttgaaaattatgatacagtctatgatagcaattactaaaaataaacaacataatgcagatttattgaaaatgtgtataaaatatactgcgtgtatgaccgattatgatactcttatagatgtacagtcgctacagcaatataaatggtatattttaaaatgtttcgatgaaatagatatcatgaagagatgttatataaaaaataaaactgtattccaattagttttttgtatcaaagacattaatactttaatgagatatggtaaacatccttctttcgtgaagtgcactagtctcgacgtatacggaagtcgtgtacgtaatatcatagcatctattagatatcgtcagagattaattagtctattatccaagaagctggatgcgggagataaatggtcgtgttttcctaacgaaataaaatataaaatattggaaaactttaacgataacgaactatccacatatctaaaaatcttataaacactattaaaatataaaatctaagtaggataaaatcacactacatcattgtttccttttagtgctcgacagtgtatactatttttaacactcataaataaaaatgaaaacgatttccgttgttacgttgttatgcgtactacctgctgttgtttattcaacatgtactgtacccactatgaataacgctaaattaacgtctaccgaaacatcgtttaatgataaacagaaagttacatttacatgtgatcagggatatcattctttggatccaaatgctgtctgcgaaacagataaatggaaatacgaaaatccatgcaagaaaatgtgcacagtttctgattatgtctctgaattatatgataagccattatacgaagtgaattccaccatgacactaagttgcaacggcgaaacaaaatattttcgttgcgaagaaaaaaatggaaatacttcttggaatgatactgttacgtgtcctaatgcggaatgtcaacctcttcaattagaacacggatcgtgtcaaccagttaaagaaaaatactcatttggggaatatatgactatcaactgtgatgttggatatgaggttattggtgcttcgtacataagttgtacagctaattcttggaatgttattccatcatgtcaacaaaaatgtgatataccgtctctatctaatggattaatttccggatctacattttctatcggtggcgttatacatcttagttgtaaaagtggttttatactaacgggatctccatcatccacatgtatcgacggtaaatggaatcccatactcccaacatgtgtacgatctaacgaaaaatttgatccagtggatgatggtcccgacgatgagacagatttgagcaaactctcgaaagacgttgtacaatatgaacaagaaatagaatcgttagaagcaacttatcatataatcatagtggcgttaacaattatgggcgtcatatttttaatctccgttatagtattagtttgttcctgtgacaaaaataatgaccaatataagttccataaattgctaccgtaaatataaatccgttaaaataattaataatttaataacaaacaagtatcaaaagattaaagacttatagctagaatcaattgagatgtcttcttcagtggatgttgatatctacgatgccgttagagcatttttactcaggcactattataacaagagatttattgtgtatggaagaagtaacgccatattacataatatatacaggctatttacaagatgcgccgttataccgttcgatgatatagtacgtactatgccaaatgaatcacgtgttaaacaatgggtgatggatacacttaatggtataatgatgaatgaacgcgatgtttctgtaagcgttggcaccggaatactattcatggaaatgtttttcgattacaataaaaatagtatcaacaatcaactaatgtatgatataattaatagcgtatctataattctagctaatgagagatatagaagcgcttttaacgacgatggtatatacatccgtagaaatatgattaacaagttgtacggatacgcatctctaactactattggcacgatcgctggaggtgtttgttattatctgttgatgcatctagttagtttgtataaataattatttcaatatactagttaaaattttaagattttaaatgtataaaaaactaataacgtttttatttgtaataggtgcattagcatcctattcgaataatgagtacactccgtttaataaactgagtgtaaaactctatatagatggagtagataatatagaaaattcatatactgatgataataatgaattggtgttaaattttaaagagtacacaatttctattattacagagtcatgcgacgtcggatttgattccatagatatagatgttataaacgactataaaattattgatatgtataccattgactcgtctactattcaacgcagaggtcacacgtgtagaatatctaccaaattatcatgccattatgataagtacccttatattcacaaatatgatggtgatgagcaacaatattctattactgcagagggaaaatgctataaaggaataaaatatgaaataagtatgatcaacgatgatactctattgagaaaacatactcttaaaattggatctacttatatatttgatcgtcatggacatagtaatacatattattcaaaatatgatttttaaaaatttaaaatatattatcacttcagtgacagtagtcaaataacaaacaacaccatgagatatattataattctcgcagttttgttcattaatagtatacacgctaaaataactagttataagtttgaatccgtcaattttgattccaaaattgaatggactggggatggtctatacaatatatcccttaaaaattatggcatcaagacgtggcaaacaatgtatacaaatgtaccagaaggaacatacgacatatccgcatttccaaagaatgatttcgtatctttctgggttaaatttgaacaaggcgattataaagtggaagagtattgtacgggactatgcgtcgaagtaaaaattggaccaccgactgtaacattgactgaatacgacgaccatatcaatttgtacatcgagcatccgtatgctactagaggtagcaaaaagattcctatttacaaacgcggtgacatgtgtgatatctacttgttgtatacggctaacttcacattcggagattctaaagaaccagtaccatatgatatcgatgactacgattgcacgtctacaggttgcagcatagactttgtcacaacagaaaaagtgtgcgtgacagcacagggagccacagaagggtttctcgaaaaaattactccatggagttcgaaagtatgtctgacacctaaaaagagtgtatatacatgcgcaattagatccaaagaagatgttcccaatttcaaggacaaaatggccagagttatcaagagaaaatttaataaacagtctcaatcttatttaactaaatttctcggtagcacatcaaatgatgttaccacttttcttagcatgcttaacttgactaaatattcataactaatttttattaatgatacaaaaacgaaataaaactgcatattatacactggttaacgcccttataggctctaaccattttcaagatgaggtccctgattatagtccttctgttcccctctatcatctactccatgtctattagacgatgtgagaagactgaagaggaaacatggggattgaaaatagggttgtgtataattgccaaagatttctatcccgaaagaactgattgcagtgttcatctcccaactgcaagtgaaggattgataactgaaggcaatggattcagggatatacgaaacaccgataaattataaaaaaagcaatgtgtccgctgtttccgttaataatactattttcgtaactggcggattattcataaataactctaatagcacgatcgtggttaacaatatggaaaaacttgacatttataaagacaaacaatggtcgattatagaaatgcctatggctagggtatatcacggcatcgactcgacatttggaatgttatattttgccggaggtctatccgttaccgaacaatatggtaatttagagaaaaacaacgagatatcttgttacaatcctagaacgaataagtggtttgatatttcatatactatttataagatatccatatcatcattgtgtaaactaaataacgtcttctatgtatttagtaaggacattggatatgtggaaaagtatgatggtgcatggaagttagtacatgatcgtctccccgctataaaggcattatcaacttctccttattgattgaaaatgaaaatataaatagtttttatgtatagcagtattaccctatagttttattgcttactactaacatggatacagatgttacaaatgtagaagatatcataaatgaaatagatagagagaaagaagaaatactaaaaaatgtagaaattgaaaataataaaaacattaacaagaatcatccaagtggatatattagagaagcactcgttattaatacaagtagtaatagtgattccattgataaagaagttatagaatgtatcagtcacgatgtaggaatatagatcatatctactaatttttataatcgatacaaaacataaaaaacaactcgttattacatagcaggcatggaatccttcaagtattgttttgataacgatggcaagaaatggattatcggaaatactttatattctggtaattcaatactatataaggtcagaaaaaatttcactagttcgttctacaattacgtaatgaaaatagatcacaaatcacacaagccattgttgtctgaaatacgattctatatatctgtattggatcctttgactatcgacaactggacacgggaacgtggtataaagtatttggctattccagatctgtatggaattggagaaaccgatgattatatgttcttcgttataaagaattcgggaagagtattcgccccaaaggatactgaatcagtcttcgaagcatgcgtcactatgataaacacgttagagtttatacactctcgaggatttacccatggaaaaatagaaccgaggaatatactgattagaaataaacgtctttcactaattgactattctagaactaacaaactatacaagagtggaaactcacatatagattacaacgaggacatgataacttcaggaaatatcaattatatgtgtgtagacaatcatcttggagcaacagtttcaaaacgaggagatttagaaatgttgggatattgcatgatagaatggttcggtggcaaacttccatggaaaaacgaaagtagtataaaagtaataaaacaaaaaaaagaatataaaaaatttatagctactttctttgaggactgttttcctgaaggaaatgaacctctggaattagttagatatatagaattagtatacacgttagattattctcaaactcctaattatgacagactacgtaaactgtttatacaagattgaaattatattctttttttatagagtgtggtagtgttacggatatctaatattaatattagactatctctatcgcgctacacgaccaatatcgattactatggatatcttcagggaaatcgcatcttctatgaaaggagagaatgtattcatttctccagcgtcaatctcgtcagtattgacaatactgtattatggagctaatggatccactgctgaacagctatcaaaatatgtagaaacggaggagaacacggataaggttagcgctcagaatatctcattcaaatccatgaataaagtatatgggcgatattctgccgtgtttaaagattcctttttgagaaaaattggcgataagtttcaaactgttgacttcactgattgtcgcactatagatgcaatcaacaagtgtgtagatatctttactgaggggaaaatcaatccactattggatgaaccattgtctcctgatacctgtctcctagcaattagtgccgtatactttaaagcaaaatggttgatgccattcgaaaaggaatttaccagtgattatcccttttacgtatctccgacggaaatggtagatgtaagtatgatgtctatgtacggcaaggcatttaatcacgcatctgtaaaggaatcattcggcaacttttcaatcatagaactgccatatgttggagatactagtatgatggtcattcttccagacaagattgatggattagaatccatagaacaaaatctaacagatacaaattttaagaaatggtgtaactctctggaagctacgtttatcgatgttcacattcccaagtttaaggtaacaggttcgtataatcttgtggatactctagtaaagtcaggactgacagaggtgttcggttcaactggagattatagcaatatgtgtaattcagatgtgagtgtcgacgctatgattcacaaaacgtatatagatgtcaatgaagagtatacagaagcagctgcagcaacttgtgcactggtgtcagactgtgcatcaacaattacaaatgagttctgtgtagatcatccgttcatctatgtgattaggcatgttgatggaaaaattcttttcgttggtagatattgctctccgacaactaattgttaaccattttttttaaaaaaatagaaaaaacatgtggtattagtgcaggtcgttgttcttccaattgcaattggtaagatgacggccaactttagtacccacgtcttttcaccacagcactgtggatgtgacagactgaccagtattgatgacgtcagacaatgtttgactgaatatatttattggtcgtcctatgcataccgcaacaggcaatgcgctggacagttgtattccacactcctctcttttagagatgatgcggaatcagtgttcatcgacattcgcgagctggtaaaaaatatgccgtgggatgatgtcaaagattgtacagaaatcatccgttgttatataccggatgagcaaaaaaccatcagagagatttcggccatcatcggactttgtgcatatgctgctacttactggggaggtgaagaccatcccactagtaacagtctgaacgcattgtttgtgatgcttgagatgctcaattacgtggattataacatcatattccggcgtatgaattgatgagttgtacatcttgacattttctttcttctcttctccctttcttctcttctcccttcctccctcttctccctttcccagaaacaaacttttttacccactataaaataaaatgagtatactacctattatatttcttcctatatttttttattcttcattcgttcagacttttaacgcgcctgaatgtatcgacaaagggcaatattttgcatcattcatggagttagaaaacgagccagtaatcttaccatgtcctcaaataaatacgctatcatccggatataatatattagatattttatgggaaaaacgaggagcggataatgatagaattataccgatagataatggtagcaatatgctaattctgaacccgacacaatcagactctggtatttatatatgcattaccacgaacgaaacctactgtgacatgatgtcgttaaatttgacaatcgtgtctgtctcagaatcaaatatagatcttatctcgtatccacaaatagtaaatgagagatctactggcgaaatggtatgtcccaatattaatgcatttattgctagtaacgtaaacgcagatattatatggagcggacatcgacgccttagaaataagagacttaaacaacggacacctggaattattaccatagaagatgttagaaaaaatgatgctggttattatacatgtgttttagaatatatatacagaggtaaaacatataacgtaaccagaattgtaaaattagaggtacgggataaaataataccttctactatgcaattaccagatggcattgtaacttcaataggtagtaatttgactattgcgtgtagagtatcgttgagacctcccacaacggatgcagacgtcttttggataagtaatggtatgtattacgaagaagatgatggggacggagacggtagaataagtgtagcaaataaaatctatatgaccgataagagacgtgttattacatcccggttaaacattaatcctgtcaaggaagaagatgctacaacgtttacgtgtatggcgtttactattcctagcatcagcaaaacagttactgttagtataacgtgaatgtatgttgttacatttccatgtcaattgagtttataagaatttttatacattatcttccaacaaacaattgacgaacgtattgctatgattaactcccacgatactatgcatattattaatcattaacttgcagactatacctagtgctattttgacatactcatgttcttgtgtaattgcggtatctatattattaaagtacgtaaatctagctatagttttattatttaattttagataatataccgtctccttatttttaaaaattgccacatcctttattaaatcatgaatgggaatttctatgtcatcgttagtatattgtgaacaacaagagcagatatctataggaaagggtggaatgcgatacattgatctatgtagttttaaaacacacgcgaactttgaagaatttatataaatcattccatcgatacatccttctatgttgacatgtatatatccaggaattcttttattaatgtcaggaaatgtataaactaaaacattgcccgaaagcggtgcctctatctgcgttatatccgttcttaacttacaaaatgtaaccaatacctttgcatgacttgttttgttcggcaacgttagtttaaacttgacgaatggattaattacaatagcatgatccgcgcatctattaagtttttttactttaacgcccttgtatgtttttacagagactttatctaaatttctagtacttgtatgtgttataaatataacgggatatagaactgaatcacctaccttagatacccaattacattttatcagatccagataataaacaaattttgtcgccctaactaattctatattgttatatattttacaattggttatgatatcatgtaataacttggagtctaacgcgcatcgtcgtacgtttatacaattgtgatttagtgtagtatatctacacatgtatttttccgcactatagtattctggactagtgataaaactatcgttatatctgtcttcaatgaactcatcgagatattgctctctgtcatattcatacacctgcataaactttctagacatcttacaatccgtgttattttaggatcatatttacatatttacgggtatatcaaagatgttagattagttaatgggaatcgtctataataatgaatattaaacaattatatgaggacttttaccacaaagcatcataaaaatgagtcgtcgtctgatttatgttttaaatatcaaccgcaaatcaactcataaaatacaagagaatgaaatatatacatattttagtcattgcaatatagaccatacttctacagaacttgattttgtagttaaaaactatgatctaaacagacgacaacatgtaactgggtatactgcactacactgctatttgtataataattactttacaaacgatgtactgaagatattattaaatcatgacgtaaatgtaacgatgaaaaccagtagcggacgtatgcctgtttatatattgcttactagatgttgcaatatttcacatgatgtagtgatagatatgatagacaaagataaaaaccacttattacatagagactattccaacctattactagagtatataaaatctcgttacatgttattaaaggaagaggatatcgatgagaacatagtatccactttattagataagggaatcgatcctaactttaaacaagacggatatacagcgttacattattattatttgtgtctcgcacacgtttataaaccaggtgagtgtagaaaaccgataacgataaaaaaggccaagcgaattatttctttgtttatacaacatggagctaatctaaacgcgttagataattgtggtaatacaccattccatttgtatcttagtattgaaatgtgtaataatattcatatgactaaaatgctgttgacttttaatccgaatttcaaaatatgtaataatcatggattaacgcctatactatgttatataacttccgactacatacaacacgatattcttgttatgttaatacatcactatgaaacaaatgttggagaaatgccgatagatgagcgtcgtatgatcgtattcgagtttatcaaaacatattctacacgtccggcagattcgataacttatttgatgaataggtttaaaaatataaatatttatacccgctatgaaggaaagacattattacacgtagcatgtgaatataataatacacacgtaatagattatcttatacgtatcaacggagatataaatgcgttaaccgacaataacaaacacgctacacaactcattatagataacaaagaaaattccccgtataccatcgattgtttactgtatatacttagatatattgtagataagaatgtgataagatcgttggtggatcaacttccatctctacctatcttcgatataaaatcatttgagaaattcatatcctactgtatacttttagatgacacattttacgataggcacgttaagaatcgcgattctaaaacgtatcgatacgcattttcaaaatacatgtcgtttgataaatacgatggtataataactaaatgtcacgacgaaacaatgttactcaaactgtccactgttctagacactacactatatgcagttttaagatgccataattcgaaaaagttaagaagatacctcaacgagttaaaaaaatataataacgataagtcctttaaaatatattctaatattatgaatgagagataccttaatgtatattataaagatatgtacgtgtcaaaggtatatgataaactatttcctgttttcacagataaaaattgtctactaacattactaccttcagaaattatatacgaaatattatacatgctgacaattaacgatctttataatatatcgtatccacctaccaaagtatagttgtatttttctcatgcgatgtgtgtaaaaaaactgatattatataaatattttagtgccgtataataaagatgacgatgaaaatgatggtacatatatatttcgtatcattattgttattgctattccacagttacgccatagacatcgaaaatgaaatcacagaattcttcaataaaatgagagatactctaccagctaaagactctaaatggttgaatccagcatgtatgttcggaggcacaatgaatgatatagccgctctaggagagccattcagcgcaaagtgtcctcctattgaagacagtcttttatcgcacagatataaagactatgtggttaaatgggagaggctagaaaagaatagacggcgacaggtttctaataaacgtgttaaacatggtgatttatggatagccaactatacatctaaattcagtaaccgtaggtatttgtgtaccgtaactacaaagaatggtgactgtgttcagggtatagttagatctcatattaaaaaacctccttcatgcattccaaaaacatatgaactaggtactcatgataagtatggcatagacttatactgtggaattctttacgcaaaacattataataatataacttggtataaagataataaggaaattaatatcgacgacattaagtattcacaaacgggaaagaaattaattattcataatccagagttagaagatagtggaagatacaactgttacgttcattacgacgacgttagaatcaagaatgatatcgtagtatcaagatgtaaaatacttacggttataccgtcgcaagaccacaggtttaaactaatactagatccaaaaatcaacgtaacgataggagaacctgccaatataacatgcactgctgtgtcaacgtcattattgattgacgatgtactgattgaatgggaaaatccatccggatggcttataggattcgattttgatgtatactctgttttaactagtagaggcggtattaccgaggcgaccttgtactttgaaaatgttactgaagaatatataggtaatacatataaatgtcgtggacacaactattattttgaaaaaacccttacaactacagtagtattggagtaaatacacaatgcatttttatatacattactgaataattattattattatttatatcgtatttgtgctataacgcgactatctaggtatttgtatctcactgatagagaacatataaatatagactctattaaacagttgtgtaaaatatcaaatcctaatagatgtggatgtacggctttacatgagtacttttataattatagatcagtcaacggaaaatacaagtatagatacaacggttactatcaatattatttatctagcgattatgaaaattataatgaatattattatgatgattatgatagaactggtatgaacagtgagagtgataatatatcaatcaaaacagaatatgaattctatgatgaaacacaagatcaaagtacacaactagtaggttacgacattaaactcaaaaccaatgaggatgattttatggctatgatagatcagtgggtgtccatgattatatagatgaatcaattaataaagtagtatatggaagagagtctcacgtaagatggcgggatatatggcaagaacataatgatggcgtatacagtataggaaaggagtgcatagataatatatacgaagacaaccataccgtagacgaattctacaagatagacagcgtatcagatgtagatgacgcggaacacatatctccgataactaatgatgtatctacacaaacatgggaaaagaaatcagagttagatagatacatggaaatgtatcctcgtcatagatatagtaagcattctgtctttaagggattttctgacaaagttagaaaaaatgatttagacatgaatgtggtaaaagaattactttctaacggtgcatctctaacaattaaggatagcagtaataaggatccaataaccgtttattttcgaagaacgataatgaatttagaaatgattgatattattaacaaacatacaactattgatgaacgaaagtatatagtacactcctatctaaaaaattataaaaatttcgattatccatttttcaggaagttagttttgactaataaacattgtctcaacaattattataatataagcgacagcaaatatggaacaccgctacatatattggcgtctaataaaaaattaataactcctaattacatgaagttattagtgtataacggaaatgatataaacgcacgaggtgaagatacacaaatgcgaactccattacacaaatatttgtgtaaatttgtatatcataatattgaatatggtatccgatactataatgaaaagattatagacgcatttatagagttaggagccgatctaactattccaaataacgatggaatgataccagtagtttactgtatacactcaaatgcagaatatggttataacaatattactaacataaagataatacgtaaactacttaatcttagtagacgtgcgtcacataatctatttagagatcgagtcatgcacgattatataagtaatacatatattgatcttgagtgtttagatattattagatcgttggatggattcgatatcaatggttactttgaaggacgtacaccacttcattgcgctatacaacataacttcactcagattgctaagtacttattagatcgaggagctgatatagtcgtacccaacacattgattatacatcagtacatacagtaaatagcatagatatggaggaggatacaaatatttcaaataaagttataaggtacaacactgtcaataatatatggaagacattacctaacttctggactggaactataaatccaggcgtggtctcgcataaagatgatatatatgttgtatgcgacatcaaagatgaaaaaaatgttaagacttgtatatttagatataacacgaatacgtataacggatgggaattggttacgacgacagaaagcagattatcagctctgcatactattcttcatgacaataccataatgatgttacattgttatgaatcgtatatgttacaagatacatttaatgtgtacactcgcgaatggaatcatatgtgtcatcaacattcgaatagttatatcatgtacaatatactacccatctactaaatataatagaataaaataaatgagtatgatcattttagataacgattgattttatcattaccgcttcattcttatattctttgcttacggaacctatatttagaaacatctactaacgattttttatgcttgcattattaatggtatgtaatatgattgattgtgtacgcaataccaatttgttaagtatgaatacggggtacaaacataaactgaaatttaacattatttatttatgatatatatcgttatcgttattgtttggtctataccatggatatctttaaagaactaatcttaaaacaccctgatgaaaatgttttgatttctccagtttctattttatctactttatctattctaaatcatggagcagctggttctacagctgaacaactatcaaaatatatagagaatatgaatgagaatacacccgatgataagaaggatgacaataatgacatggacgtagatattccgtattgtgcgacactagctaccgcaaataaaatatacggtagcgatagtatcgagttccacgcctccttcctacaaaaaataaaagacgattttcaaactgtaaactttaataatgctaaccaaacaaaggaactaatcaacgaatgggttaagacgatgacaaatggtaaaattaattccttattgactagtccgctatccattaatactcgtatgacagttgttagcgccgtccattttaaagcaatgtggaaatatccattttctaaacatcttacatatacagacaagttttatatttctaagaatatagttaccagtgttgatatgatggtgggtaccgagaataacttgcaatatgtacatattaatgaattattcggaggattctctattatcgatattccatacgagggaaactctagtatggtaattatactaccggacgacatagaaggtatatataacatagaaaaaaatataacagatgaaaaatttaaaaaatggtgtggtatgttatctactaaaagtatagacttgtatatgccaaagtttaaagtggaaatgacagaaccgtataatctggtaccgattttagaaaatttaggacttactaatatattcggatattatgcagattttagcaagatgtgtaatgaaactatcactgtagaaaaatttctacatacgacgtttatagatgttaatgaggagtatacagaagcatcggccgttacaggagtatttatgactaacttttcgatggtatatcgtacgaaggtctacataaaccatccattcatgtacatgattaaagacaacacaggacgtatactttttatagggaaatactgctatccgcaataaatataaacaaatagacttttatcacgtttatctatgtctaaatattacaaatagtaatagtataaactaaagctgataatacttaaaaaaataataatatcatttacaattaatagtataaactaaaaattaaacaaatcgttattataagtaatatcaaaatgatgatatacggattaatagcgtgtcttatattcgtgacttcatccatcgctagtccactttatattcccgttattccacccattacggaagataaatcgttcaatagtgtagaggtattagtttccttgtttagagatgaccaaaaagactatacggtaacttctcagttcaataactacactatcgataccaaagactggactatcggcgtactatccacacctgatggtttggatataccattgactaatataacttattggtcacggtttactataggtcgtgcattgttcaaatcagagtctgaggatattttccaaaagaaaatgagtattctaggtgtttctatagaatgtaagaagtcgtcgacattacttacttttttgaccgtgcgtaaaatgactcgagtatttaataaatttccagatatggcttattatcgaggagactgtttaaaagccgtttatgtaacaatgacttataaaaatactaaaactggagagactgattacacgtacctctctaatggggggttgcctgcatactatcgtaatggggtcgatggttgattattgattagtatattccttattcacacaaaaagaacatttttataaacatgaaaccactgtctaaatgtaattatgatcttgatttatagatgaagatcagcctttagaggattttaaccagtatgtttaatatgaaaaaaataaacataacatattttgagattaagcgctattgtgcttaattattttgctctataaactgaatatatagccacaattattgacgggcttgtttatgaccggcaatcatgaatttacagaaattatctctggctatatatcttactgcgacatgttcgtggtgttatgaaacatgcataagaaaaactgcgttgtatcatgacattcaattggagcatgtagaagacaataaagatagtgtagcgtcgctaccgtacaagtagtcaatcaaagagaacgtagtagattgttggctacatttaattggacagatatagctgagggtgttagaaatgagttcattaaaatatgtgatatcaacggaacatatttatataattatactattgctgttagtataattattgattccacggaagaactaccaacagttactccaattacaacaacatatgaaccttctacatataattatactatcgatgatagcactgttattactactgaagaactacaagtgactcctcatatggatctccatcgatgatacatgtattaaaatactttccgaataagtcttttaaatattgtattaattatgaaaaactatgctatgcgagtatgatgcaaagatgtttaatgatacgatactagattttatctctagcgagagatgtcgttagaatcatttatcataactacgtttaataataattcatcaacgaatatcgataacatgtgtcatttatacgttaaagtctgtccgtcttctctattgtttagactgtttgtagaatgctgtgatataaacaaactagtagaaggtacgactccgttacactgttatctaatgaatgaaggatttgaatcatctgttttaaaaaacctattaaaggagtatgtcatgaatacgtttaatgttcatgacatccattacacaaatatttaactcatgatgaagttgagaatgatatgctttctgatagtatagatagctttagctaatataaaaatatattaatccactatatattctagacttgatttaaaaccgataaactactactacgtactgtataagttgttaaaaaaaggagcagaccctaattatgtagatgatagaggtaatacttttcttcattacttctgcatctatatgtccacttatgagaaaacgtcatttaataagatgcatcgtgaaaagaaatttattaaagagttggtaaaatatgaaaccgaaagtaaataatataggaaatacacctctacataactacgtatctcaatatgatatcactctcattcctcatccacaacccattaaaaaaatggaaattaaagccctctattagcataaacggctacaggtctacctttacaatggcctctccttgtgcccagttcagaccctgtcattgccacgctactaaggactccctgaataccgtggccgacgtcagacattgtctgactgaatacatcctgtgggtttctcatagatggacccatagagaaagcgcagggtctctctacaggcttctcatctctttcagaactgatgcaacggagctctttggtggtgagttgaaggattcacttccgtgggacaatatcgacaattgcgtggagatcattaaatgtttcatcagaaatgactccatgaaaaccgccgaagaacttcgtgcaatcattggactttgtactcaatcagctatcgtctctggaagagtcttcaacgataagtatatcgacatactacttatgctgcgaaagattctgaacgagaacgactatctcaccctcttggatcatatccgcactgctaaatactaaatctccttcatgctctctcactacactttttatcatcttatgaggaatgattgccttcatcatttttcgtgaaataggaataattagcaccagaatagctatggattgcacatgtattctatgtcgtctactggatgaagatgtgacgtacaaaaaaataaaactagaaattgaaacgtgtcacaacttatcaaaacatatagatagacgaggaaacaatgcgctacattgttacgtcttcaataaatgcgatacagacattaagattgttcgactgttactctctcgcggagtcgagagactttgtagaaacaacgaaggattaactccgctaggagcatacagtaagcatagatacgtaaaatctcaaattgtgcatctactgatatccagctattcgaattcctctaacgaactcaagtcgaatataaatgatttcgatctgtattcgtatatgtcttcggataatatcgacttacgtctgctaaaatacctaattgtggataaacggatacgtccgtccaagaatacgaattatgcaatcaatggtctcggattggtggatatatacgtaacgacgcctaatccgagaccagaagtattgctatggcttcttaaatcagaatgttacagcaccggttacgtatttcgtacctgtatgtacgacagtgatatgtgtaagaactctcttcattactatatatcgtctcatagagaatctcaatctctatccaaggatgtaattaaatgtttgatcaataacaatgtttccatccatggcagagacgaaggaggatctttacccatccaatactactggtcttgctcaaccatagatatagagattgttaaattattaataaaggatgtggacacgtgtagagtatacgacgtcagccctatattagaggcggattatctaaacaagcgatttagagtaaccccatataatgtagacatggaaatcgttaatcttcttattgagagacgtcatactcttgtcgacgtaatgcgtagtattacttcttacgattccagagactataaccactacatcatcgataacattctaaagagatttagacaacaggatgaatccatcgtacaagccatgttgataaactacttacattacggcgatatggtcgttcgatgcatgttagataacggacaacaactatcctctgcacgactactttgttaataataatctcgtcgatgtaaacgtcgtaaggtttatcgtggaaaataatggacacatggctgtaaatcacgtatcgaacaatggccgtctatgtatgtacggtctgatattatcgagatttaataattgcgggtatcactgttatgaaaccatactaatagatgtatttgatatactaagcaagtacatggataatatagatatgatcgataatgagaataaaactctactatattacgcggtcgatgtcaataatatacaatttgcaaagcggttattggaatatggagcgagtgttacaacatcacgctcgataatcaatacggccatccagaaaagtagttacagaagagaaaacaaaacgaggatagttgatttattacttagctaccatcccactctagagactatgattgacgcatttaatagagatatacgctatctatatcctgaaccattattcgcctgtatcagatacgccttaatcctagatgatgattttccttctaaagtaagtatgatatctccggtcgtcataaggaactaaagcgctatagagtagacattaatagaatgaagaatgcctacatatcaggcgtctccatgtttgatatattatttaaacgaagcaaacgccacagattgagatacgcaaagaatccgacatcaaatggtacaaaaaagaactaacgtccatcattacagaaactgtaaagaacaatgagaggatcgactccatagtggacaacattaatacagacgataacttgatttcgaaattacccatggagatactttattactccattaaataatttatcatggagcgataatgtcctgtttcatttgtttccatgacatattacaaaatcgattccgtccaagatgataaaaacatttaccggcatcataaacacggagtttattttatatgtctcgcataaacattactaaaaaaatatattgttcggttttctttcacatctttaattatgaaaaagtaaatcattatgagatggacgagattgtacgcatcgttcgcgacagtatgtggtacatacctaacgtatttatggacgacggtaagaatgaaggtcacgtttctgtcaacaatgtttgtcatatgtattttacgttctttgatgtggatacatcgtctcatctgtttaagctagttattaaacactgcgatctgaataaacgaggtaactctccattacattgctatacgatgaatacacgatttaatccatctgtattaaagatattgttacaccacggcatgcgtaactttgatagcaaggatgaaaaaggacatattcctctacaccactatctgattcattcactatcaatcgataacaagatctttgatatactaacggacaccattgatgactttagtaaatcatccgatctattgctgtgttatcttagatataaattcaatgggagcttaaactattacgttctgtacaaaggatccgaccctaattgcgtcgacgaggatggactcacttctcttcattactactgtaaacacatatccacgttctacaaaagcaattattacaagttaagtcacactaagatgcgagccgagaagcgattcatctacgcgataatagattatggagcaaacattaacgcggttacacacttaccttcaacagtataccaaacatagtcctcgtgtggtgtatgctcttttatctcgaggagccgatacgaggatacgtaataatcttgattgtacacccatcatggaacgattgtgcaacaggtcatattctcataatgttactcaattggcacgaacaaaaggaagaaggacaacatctactttatctattcataaaacataatcaaggatacactctcaatatactacggtatctactagataggttcgacattcagaaagacgaatactataataccgcctttcaaaattgtaacaacaatgttgcctcatacatcggatacgacatcaaccttccgactaaagacggtattcgacttggtgtttgaaaacagaaacatcatatacaaggcggatgttgtgaatgacatcatccaccacagactgaaagtatctctacctatgattaaatcgttgttctacaagatgtcagaattctctccctacgacgattactacgtaaaaaagatactagcctactgcctattaagggacgagtcattcgcggaactacatagtaaattctgtttaaacgaggactataaaagtgtatttatgaaaaatatatcattcgataagatagattccatcatcgtgacataagtcgccttaaagagattcgaatctccgacaccgacctgtatacggtatcacagctatcttaaagccatacattcggacagacacatttcatttcccatgtacgacgatctcatagaacagtgccatctatcgatggagcataaaagtaaactcgtcgacaaagcactcaataaattagagtctaccatcggtcaatctagactatcgtatttgcctccggaaattatgcgcaatatcatctaaacagtatgttgtacggaaagaaccattacaaatattatccatgatagaaagaaaatatctatatgattggagaagtaggaaacaggaacaagacgacgattactacattattaaatcatgaagtccgtattatactcgtatatattgtttctctcatgtataataataaacggaagagatatagcaccgcatgcaccatccgatggaaagtgtaaagacaacgaatacaaacgccataatttgtgtccgggaacatacgcttccagattatgcgatagcaagactaacacacgatgtacaccctgtggttcgggtaccttcacatctcgcaataatcatttacccgcttgtctaagttgtaacggaagacgcgatcgtgtaacacgactcacaatagaatctgtgaatgctctcccggatattattgtcttctcaaaggatcatccggatgcaaggcatgtgtttcccaaacaaaatgtggaataggatacggagtatccggagacgtcatctgttctccgtgtggtctcggaacatattctcacaccgtctcttccgcagataaatgcgaacccgtacccagtaatacctttaactatatcgatgtggaaattaatctgtatcccgtcaacgacacgtcgtgtactcggacgaccactaccggtctcagtgaatccatctcaacgtcggaactaactattactatgaatcataaagactgtaatcccgtatttcgtgaggaatacttctctgtccttaataaggtagcaacttcaggtttctttacaggagaaaggtgtgcactctgaatttcgagattaaatgcaataacaaagattcttcctccaaacagttaacgaaagcaaagaatgatgacggtatcatgccgcattcggagacagtaactctagtgggcgactgtatatctagcgtcgacatctatatactatatagtaataccaatactcaagactacgaaactgatacaatctcttatcatgtgggtaatgttctcgatgtcgatagccatatgcccggtagttgcgatatacataaactgatcactaattccaaacccacccgctttttatagtaagtttttcacccataaataataaatacaataattaatttctcgtaaaagtagaaaatatattctaatttattgcatggtaaggaagtagaatcataaagaacagtactcaatcaatagcaattatgaaacaatatatcgtcctggcatgcatgtgcctgccagtcttcagcaatcatcctcatcctcatcctcgtgtacggaagaagaaaacaaacatcatatgggaatcgatgttattatcaaagtcacaaagcaagaccaaacaccgaccaatgataagatttgccaatccgtaacggaaattacagagtccgagtcagatccaaatcccgaggtggaatcagaagatgattccacatcagtcgaggatgtagatcctcctaccacttattactccatcatcggtggaggtctgagaatgaactttggattcaccaaatgtcctcagattaaatccatctcagaatccgctgatggaaacacagtgaatgctagattgtccagcgtgtccccaggacaaggtaaggactctcccgcgatcactcatgaagaagctcttgctatgatcaaagactgtgaggtgtctatcgacatcagatgtagcgaagaagagaaagacagcgacatcaagacccatccagtactcgggtctaacatctctcataagaaagtgagttacgaagatatcatcggttcaacgatcgtcgatacaaaatgtgtcaagaatctagagtttagcgttcgtatcggagacatgtgcaaggaatcatctgaacttgaggtcaaggatggattcaagtatgtcgacggatcggcatctgaaggtgcaaccgatgatacttcactcatcgattcaacaaaactcaaagcgtgtgtctgaatcgataactctattcatctgaaattggatgagtagggttaatcgaacgattcaggcacaccacgaattaaaaaagtgtaccggacactatattccggtttgcaaaacaaaaatgttcttaactacattcacaaaaagttacctctcgcgacttcttctttttctgtctcaatagtgtgatacgattatgacactattcctattcctattcctatttcctttcagggtatcacaaaaatattaaacctctttctgatggtctcataaaaaaagttttacaaaaatatttttattctctttctctctttgatggtctcataaaaaaagttttacaaaaatatttttattctctttctctctttgat

SEQ ID NO: 82 - DNA, 199360 bp, Vaccinia virus
  source 1..199360: mol_type = genomic DNA
  misc_feature 1..199360: note = VIR103
atcaaagagagaaagagaataaaaatatttttgtaaaactttttttatgagaccatcaaagagagaaagagaataaaaatatttttgtaaaactttttttatgagaccatcagaaagaggtttaatatttttgtgataccctgaaaggaaataggaataggaataggaatagtgtcataatcgtatcacactattgagacagaaaaagaagaagtcgcgagaggtaactttttgtgaatgtagttaagaacatttttgttttgcaaaccggaatatagtgtccggtacacttttttaattcgtggtgtgcctgaatcgttcgattaaccctactcatccaatttcagatgaatagagttatcgattcagacacacgctttgagttttgttgaatcgatgagtgaagtatcatcggttgcaccttcagatgccgatccgtcgacatacttgaatccatccttgacctcaagttcagatgattccttgcacatgtctccgatacgaacgctaaactctagattcttgacacattttgtatcgacgatcgttgaaccgatgatatcttcgtaactcactttcttatgagagatgttagacccgagtactggatgggtcttgatgtcgctgtctttctcttcttcgctacatctgatgtcgatagacacctcacagtctttgatcatagcaagagcttcttcatgagtgatcgcgggagagtccttaccttgtcctggggacacgctggacaatctagcattcactgtgtttccatcagcggattctgagatggatttaatctgaggacatttggtgaatccaaagttcattctcagacctccaccgatgatggagtaataagtggtaggaggatctacatcctcgactgatgtggaatcatcttctgattccacctcgggatttggatctgactcggactctgtaatttccgttacggattggcaaatcttatcattggtcggtgtttggtcttgctttgtgactttgataataacatcgattcccatatgatgtttgttttcttcttccgtacacgaggatgaggatgaggatgattgctgaagactggcaggcacatgcatgccaggacgatatattgtttcataattgctattgattgagtactgttctttatgattctacttccttaccatgcaataaattagaatatattttctacttttacgagaaattaattattgtatttattatttatgggtgaaaaacttactataaaaagcgggtgggtttggaattagtgatcagtttatgtatatcgcaactaccgggcatatggctatcgacatcgagaacattacccacatgataagagattgtatcagtttcgtagtcttgagtattggtattactatatagtatatagatgtcgacgctagatatacagtcgcccactagagttactgtctccgaatgcggcatgataccgtcatcattctttgctttcgttaactgtttggaggaagaatctttgttattgcatttaatctcgaaattcagagtgcacacctttctcctgtaaagaaacctgaagttgctaccttattaaggacagagaagtattcctcacgaaatacgggattacagtctttatgattcatagtaatagttagttccgacgttgagatggattcactgagaccggtagtggtcgtccgagtacacgacgtgtcgttgacgggatacagattaatttccacatcgatatagttaaaggtattactgggtacgggttcgcatttatctgcggaagagacggtgtgagaatatgttccgagaccacacggagaacagatgacgtctccggatactccgtatcctattccacattttgtttgggaaacacatgccttgcatccggatgatcctttgagaagacaataatatccgggagagcattcacagattctattgtgagtcgtgttacacgatcgcgtcttccgttacaacttagacaagcgggtaaatgattattgcgagatgtgaaggtacccgaaccacagggtgtacatcgtgtgttagtcttgctatcgcataatctggaagcgtatgttcccggacacaaattatggcgtttgtattcgttgtctttacactttccatcggatggtgcatgcggtgctatatctcttccgtttattattatacatgagagaaacaatatatacgagtataatacggacttcatgatttaataatgtagtaatcgtcgtcttgttcctgtttcctacttctccaatcatatagatattttctttctatcatggataatatttgtaatggttctttccgtacaacatactgtttagatgatattgcgcataatttccggaggcaaatacgatagtctagattgaccgatggtagactctaatttattgagtgctttgtcgacgagtttacttttatgctccatcgatagatggcactgttctatgagatcgtcgtacatgggaaatgaaatgtgtctgtccgaatgtatggctttaagatagctgtgataccgtatacaggtcggtgtcggagattcgaatctctttaaggcgacttatgtcacgatgatggaatctatcttatcgaatgatatatttttcataaatacacttttatagtcctcgtttaaacagaatttactatgtagttccgcgaatgactcgtcccttaataggcagtaggctagtatcttttttacgtagtaatcgtcgtagggagagaattctgacatcttgtagaacaacgatttaatcataggtagagatactttcagtctgtggtggatgatgtcattcacaacatccgccttgtatatgatgtttctgttttcaaacaccaagtcgaataccgtctttagtcggaaggttgatgtcgtatccgatgtatgaggcaacattgttgttacaattttgaaaggcggtattatagtattcgtctttctgaatgtcgaacctatctagtagataccgtagtatattgagagtgtatccttgattatgttttatgaatagataaagtagatgttgtccttcttccttttgttcgtgccaattgagtaacattatgagaatatgacctgttgcacaatcgttccatgatgggtgtacaatcaagattattacgtatcctcgtatcggctcctcgagataaaagagcatacaccacacgaggactatgtttggtatactgttgaaggtaagtgtgtaaccgcgttaatgtttgctccataatctattatcgcgtagatgaatcgcttctcggctcgcatcttagtgtgacttaacttgtaataattgcttttgtagaacgtggatatgtgtttacagtagtaatgaagagaagtgagtccatcctcgtcgacgcaattagggtcggatcctttgtacagaacgtaatagtttaagctcccattgaatttatatctaagataacacagcaatagatcggatgatttactaaagtcatcaatggtgtccgttagtatatcaaagatcttgttatcgattgatagtgaatgaatcagatagtggtgtagaggaatatgtcctttttcatccttgctatcaaagttacgcatgccgtggtgtaacaatatctttaatacagatggattaaatcgtgtattcatcgtatagcaatgtaatggagagttacctcgtttattcagatcgcagtgtttaataactagcttaaacagatgagacgatgtatccacatcaaagaacgtaaaatacatatgacaaacattgttgacagaaacgtgaccttcattcttaccgtcgtccataaatacgttaggtatgtaccacatactgtcgcgaacgatgcgtacaatctcgtccatctcataatgatttactttttcataattaaagatgtgaaagaaaaccgaacaatatatttttttagtaatgtttatgcgagacatataaaataaactccgtgtttatgatgccggtaaatgtttttatcatcttggacggaatcgattttgtaatatgtcatggaaacaaatgaaacaggacattatcgctccatgataaattatttaatggagtaataaagtatctccatgggtaatttcgaaatcaagttatcgtctgtattaatgttgtccactatggagtcgatcctctcattgttctttacagtttctgtaatgatggacgttagttcttttttgtaccatttgatgtcggattctttgcgtatctcaatctgtggcgtttgcttcgtttaaataatatatcaaacatggagacgcctgatatgtaggcattcttcattctattaatgtctactctatagcgctttagttccttatgacgaccggagatatcatacttactttagaaggaaaatcatcatctaggattaaggcgtatctgatacaggcgaataatggttcaggatatagatagcgtatatctctattaaatgcgtcaatcatagtctctagagtgggatggtagctaagtaataaatcaactatcctcgttttgttttctcttctgtaactacttttctggatggccgtattgattatcgagcgtgatgttgtaacactcgctccatattccaataaccgctttgcaaattgtatattattgacatcgaccgcgtaatatagtagagttttattctcattatcgatcatatctatattatccatgtacttgcttagtatatcaaatacatctattagtatggtttcataacagtgatacccgcaattattaaatctcgataatatcagaccgtacatacatagacggccattgttcgatacgtgatttacagccatgtgtccattattttccacgataaaccttacgacgtttacatcgacgagattattattaacaaagtagtcgtgcagaggatagttgttgtccgttatctaacatgcatcgaacgaccatatcgccgtaatgtaagtagtttatcaacatggcttgtacgatggattcatcctgttgtctaaatctctttagaatgttatcgatgatgtagtggttatagtctctggaatcgtaagaagtaatactacgcattacgtcgacaagagtatgacgtctctcaataagaagattaacgatttccatgtctacattatatggggttactctaaatcgcttgtttagataatccgcctctaatatagggctgacgtcgtatactctacacgtgtccacatcctttattaataatttaacaatctctatatctatggttgagcaagaccagtagtattggatgggtaaagatcctccttcgtctctgccatggatggaaacattgttattgatcaaacatttaattacatccttggatagagattgagattctctatgagacgatatatagtaatgaagagagttcttacacatatcactgtcgtacatacaggtacgaaatacgtaaccggtgctgtaacattctgatttaagaagccatagcaatacttctggtctcggattaggcgtcgttacgtatatatccaccaatccgagaccattgattgcataattcgtattcttggacggacgtatccgtttatccacaattaggtattttagcagacgtaagtcgatattatccgaagacatatacgaatacagatcgaaatcatttatattcgacttgagttcgttagaggaattcgaatagctggatatcagtagatgcacaatttgagattttacgtatctatgcttactgtatgctcctagcggagttaatccttcgttgtttctacaaagtctctcgactccgcgagagagtaacagtcgaacaatcttaatgtctgtatcgcatttattgaagacgtaacaatgtagcgcattgtttcctcgtctatctatatgttttgataagttgtgacacgtttcaatttctagttttatttttttgtacgtcacatcttcatccagtagacgacatagaatacatgtgcaatccatagctattctggtgctaattattcctatttcacgaaaaatgatgaaggcaatcattcctcataagatgataaaaagtgtagtgagagagcatgaaggagatttagtatttagcagtgcggatatgatccaagagggtgagatagtcgttctcgttcagaatctttcgcagcataagtagtatgtcgatatacttatcgttgaagactcttccagagacgatagctgattgagtacaaagtccaatgattgcacgaagttcttcggcggttttcatggagtcatttctgatgaaacatttaatgatctccacgcaattgtcgatattgtcccacggaagtgaatccttcaactcaccaccaaagagctccgttgcatcagttctgaaagagatgagaagcctgtagagagaccctgcgctttctctatgggtccatctatgagaaacccacaggatgtattcagtcagacaatgtctgacgtcggccacggtattcagggagtccttagtagcgtggcaatgacagggtctgaactgggcacaaggagaggccattgtaaaggtagacctgtagccgtttatgctaatagagggctttaatttccatttttttaatgggttgtggatgaggaatgagagtgatatcatattgagatacgtagttatgtagaggtgtatttcctatattatttactttcggtttcatattttaccaactctttaataaatttcttttcacgatgcatcttattaaatgacgttttctcataagtggacatatagatgcagaagtaatgaagaaaagtattacctctatcatctacataattagggtctgctcctttttttaacaacttatacagtacgtagtagtagtttatcggttttaaatcaagtctagaatatatagtggattaatatatttttatattagctaaagctatctatactatcagaaagcatatcattctcaacttcatcatgagttaaatatttgtgtaatggatgtcatgaacattaaacgtattcatgacatactcctttaataggttttttaaaacagatgattcaaatccttcattcattagataacagtgtaacggagtcgtaccttctactagtttgtttatatcacagcattctacaaacagtctaaacaatagagaagacggacagactttaacgtataaatgacacatgttatcgatattcgttgatgaattattattaaacgtagttatgataaatgattctaacgacatctctcgctagagataaaatctagtatcgtatcattaaacatctttgcatcatactcgcatagcatagtttttcataattaatacaatatttaaaagacttattcggaaagtattttaatacatgtatcatcgatggagatccatatgaggagtcacttgtagttcttcagtagtaataacagtgctatcatcgatagtataattatatgtagaaggttcatatgttgttgtaattggagtaactgttggtagttcttccgtggaatcaataattatactaacagcaatagtataattatataaatatgttccgttgatatcacatattttaatgaactcatttctaacaccctcagctatatctgtccaattaaatgtagccaacaatctactacgttctctttgattgactacttgtacggtagcgacgctacactatctttattgtcttctacatgctccaattgaatgtcatgatacaacgcagtttttcttatgcatgtttcataacaccacgaacatgtcgcagtaagatatatagccagagataatttctgtaaattcatgattgccggtcataaacaagcccgtcaataattgtggctatatattcagtttatagagcaaaataattaagcacaatagcgcttaatctcaaaatatgttatgtttatttttttcatattaaacatactggttaaaatcctctaaaggctgatcttcatctataaatcaagatcataattacatttagacagtggtttcatgtttataaaaatgttctttttgtgtgaataaggaatatactaatcaataatcaaccatcgaccccattacgatagtatgcaggcaaccccccattagagaggtacgtgtaatcagtctctccagttttagtatttttataagtcattgttacataaacggcttttaaacagtctcctcgataataagccatatctggaaatttattaaatactcgagtcattttacgcacggtcaaaaaagtaagtaatgtcgacgacttcttacattctatagaaacacctagaatactcattttcttttggaaaatatcctcagactctgatttgaacaatgcacgacctatagtaaaccgtgaccaataagttatattagtcaatggtatatccaaaccatcaggtgtggatagtacgccgatagtccagtctttggtatcgatagtgtagttattgaactgagaagttaccgtatagtctttttggtcatctctaaacaaggaaactaatacctctacactattgaacgatttatcttccgtaatgggtggaataacgggaatataaagtggactagcgatggatgaagtcacgaatataagacacgctattaatccgtatatcatcattttgatattacttataataacgatttgtttaatttttagtttatactattaattgtaaatgatattattatttttttaagtattatcagctttagtttatactattactatttgtaatatttagacatagataaacgtgataaaagtctatttgtttatatttattgcggatagcagtatttccctataaaaagtatacgtcctgtgttgtctttaatcatgtacatgaatggatggtttatgtagaccttcgtacgatataccatcgaaaagttagtcataaatactcctgtaacggccgatgcttctgtatactcctcattaacatctataaacgtcgtatgtagaaatttttctacagtgatagtttcattacacatcttgctaaaatctgcataatatccgaatatattagtaagtcctaaattttctaaaatcggtaccagattatacggttctgtcatttccactttaaactttggcatatacaagtctatacttttagtagataacataccacaccattttttaaatttttcatctgttatatttttttctatgttatatataccttctatgtcgtccggtagtataattaccatactagagtttccctcgtatggaatatcgataatagagaatcctccgaataattcattaatatgtacatattgcaagttattctcggtacccaccatcatatcaacactggtaactatattcttagaaatataaaacttgtctgtatatgtaagatgtttagaaaatggatatttccacattgctttaaaatggacggcgctaacaactgtcatacgagtattaatggatagcggactagtcaataaggaattaattttaccatttgtcatcgtcttaacccattcgttgattagttcctttgtttggttagcattattaaagtttacagtttgaaaatcgtcttttattttttgtaggaaggaggcgtggaactcgatactatcgctaccgtatattttatttgcggtagctagtgtcgcacaatacggaatatctacgtccatgtcattattgtcatccttcttatcatcgggtgtattctcattcatattctctatatattttgatagttgttcagctgtagaaccagctgctccatgatttagaatagataaagtagataaaatagaaactggagaaatcaaaacattttcatcagggtgttttaagattagttctttaaagatatccatggtatagaccaaacaataacgataacgatatatatcataaataaataatgttaaatttcagtttatgtttgtaccccgtattcatacttaacaaattggtattgcgtacacaatcaatcatattacataccattaataatgcaagcataaaaaatcgttagtagatgtttctaaatataggttccgtaagcaaagaatataagaatgaagcggtaatgataaaatcaatcgttatctaaaatgatcatactcatttattttattctattatattaacacatacatttttaacagcaacacattcaatattgtattgttatttttatattatttacacaattaacaatatattattagtttatattactgaattaataatataaaattcccaatcttgtcataaacacacactgagaaacagcataaacacaaaatccatcaaaaatgtcgatgaaatatctgatgttgttgttcgctgctatgataatcagatcattcgccgatagtggtaacgctatcgaaacgacattgccagaaattacaaacgctacaacagatattccagctatcagattatgcggtccagagggagatggatattgtttacacggtgactgtatccacgctagagatatcgacggtatgtattgtagatgctctcatggttatacaggcattagatgtcagcatgtagtattagtagactatcaacgttcagaaaaaccaaacactacaacgtcatatatcccatctcccggtattgtgcttgtattagtaggcattattattatgtgttgtctattatctgtttataggttcactcgaagaactaataaactacctctacaagatatggttgtgccataatttttataaatttttttatgagtatttttacaaaaaaaatgtataaagtgtatgtcttatgtatatttataaaaatgctaagtatgcgatgtatctatgttatttgtatttatctaaacaatacctctacctctagatattatacaaaaattttttatttcggcatattaaagtaaaatctagttaccttgaaaatgaatacagtgggtggttccgtatcaccagtaagaacataatagtcgaatacagtatccgattgagattttgcatacaatactagtctagaaagaaatttgtaatcattttctgtgacgggagtccatatatctgtatcatcgtctagtttatcagtgtcccatgctatatttctgttatcatcattagttaatgaaaataactctcgtgcttcagaaaagtcaaatattgtatccatacatacatctccaaaactatcgcttatacgtttatctttaacgatacctatacctagatggttatttactaacagacattttccagatctattgactataactcctatagtttccacatcaaccaagtaatgatcatctattgttatataacaataacataactcttttccatttttatcagtatgtatatctatatcaacgtcgtcgttgtagtgaatagtagtcattgatctattatatgaaacggatatgtctagaacggcaattgtcttacgtccagttaacactttcgttgatttaaagtctagagtctttgcaaacataatatccttatccgactttatatttcctgtagggtggtataattttattttgcctccacatatcggtgtttccaaatatattactagacaatattccatatagttattagttaagggtacccaattagaacacgtacgcttattatcatcatttggatcgtatttcataaaagttattgtactatcgatgtcaacacattctacattttttaatcgtctatatagtatttttctgatattttctataatatcagaattgtcttccatcggaagttgtatactatcggaatcagttacatgtttaaataattctctgatgtcattccttatacaatcaaattcattattaaacagtttaatagtctgtagacctttatcgtcgtaaatatccattgtcttattagttacgcttatttttatgtgttttacgttgctttattatattttataagaatgattgtttgacgaatcacgagaactattaagacacattattaggtatatattataaaaaagtttttgattacgatgttataagaggaaagaggacacattaacatcatacatcaattaactacattcttataacatcgtaatcaaaagaattgcaattttgatgtataacaactgtcaatgggttatggaattgtatattacatattatacggtatgttggtaacgacaaataccgatcggtaatcgtttgccggtgtaatagaattatatatatctatctattacaccggctgagtatacataataataagttgtggtagtatgatctccatatttataatttaggactttgtattcagtatttttggaatcataaaaaataaaaaaaagttttactaatttaaaatttaaaaagtatttacatttttttcactgtttagtcgcggatatggaattcgatcctgccaaaatcaatacatcatctatagatcatgtaacaatattacaatacatagatgaaccaaatgatataagactaacagtatgcattatccgaaatattaataacattacatattatatcaatatcacaaaaataaatacacatttggctaatcaatttcgggcttggaaaaaacgtatcgccggaagggactatatgactaacttatctagagatacaggaatacaacaatcaaaacttactgaaactatacgtaactgtcaaaaaaatagaaacatatatggtctatatatacactacaatttagttattaatgtggttattgattggataaccgatgtgattgttcaatcaatattaagagggttggtaaattggtacatagctaataatacctatactccaaatacacccaataatacaacaaccatttctgagttggatatcatcaaaatactaaataaatacgaggacgtgtatagagtaagtaaagaaaaagaatgtggaatttgctatgaagttgtttactcaaaacgattagaaaacgatagatactttggtttattggattcgtgtactcatatattttgcataacatgcatcaatatatggcataaaacacgaagagaaaccggtgcgtcggataattgtcctatatgtcgtacccgttttagaaacataacaatgagcaagttctataagctagttaactaataaataaaaagtttaatttgttgacgacgtatgtcgttattttttctcgtataaaagattaatttgattctaatataatctttagtattggataaatatcaattcaaattaattccattagattatatcataaataaaaatagtagcacgcactacttcagccaaatattcttttttgaaacgccatctatcgtagtgaggacacaagtgaacctataatgagcaaatttattagtatcggttacatgaaggactttacgtagagtggtgattccactatctgtggtacgaacggtttcatcttctttgatgccatcacccagatgttctataaacttggtatcctcgtccgatttcatatcctttgccaaccaatacatatagctaaactcaggcatatgttccacacatcctgaacaatgaaattctccagaagatgttacaatgtctagatttggacatttggtttcaaccgcgttaacatatgagtgaacacacccatacatgaaagcgatgagaaataggattttcatcttgccaaaatatcactagaaaaaatttatttatcaattttaaaggtataaaaaatacttattgttgctcgaatattttgtatttgatggtatacggaagattagaaatgtaggtattatcatcaactgattctatggttttatgtattctatcatgtttcactattgcgttggaaataatatcatatgcttccacatatattttattttgttttaactcataatactcacgtaattctggattattggcatatctgtgaataattttagctccatgatcagtaaatattaatgagaacatagtattaccacctaccattatttttttcatttcgttcaattcttgattgcaaagatctatataatcattatagcgttgacttatggactctggaatcttagacgatgtacagtcatctataatcatggcatatttaatacattgttttatagcatagtagttatctacgatgttagatatttctctcaatgaatcaatcacacaatctaatgtaggtttatgacataatagcattttcagcagttcaatgtttctagattcgttgatggcaatggctatacatgtatatccgttatttgatctaatgttgacatctgaaccggattctagcagtaaagatactagagattgtttattatatctaacagccttgtgaagaagtgtttctcctcgtttgtcaatcatgttaatgtctttaagataaggtaggcaaatgtttatagtactaagaattgggcaagcataagacatgtcacaaagaccctttttgtatgtataagtgtagaaattataacatccatagttggatttacataggtgtccaatcgggatctctccatcatcgagatgattgacggcatctcccccttccttttttagtagatatttcatcgtgtaagaatcaatattaatatttctaaagtatccgtgtatagcctctttatttaccacagctccatattccaacatgcattccactaaagggatatcgatatcgccgaatgtcatatactcaattagtatatgttggaggacatccgagttcattgttttcaatatcaaagagatggtttccttatcatttctccatagtggtacaatactacacattattccgtgaggctttccattctccaaaaacaatttgaccaaatctacatctttattgtatctataatcactatttagataatcagccataattcctcgagtgcaacatgttagatcgtctatatatgaataagccgtgttatctattcctttcattaacaatttaacgatgtctatatctatatgagatgacttaatataatattgaagagctgtacaatagtttttatctatagaagacggcttgattccgtgattaattagacatttaacaacttccggacgcacatatgctctcgtatccgactctgaatacagatgagagatgatatacagatgcaatacggtaccgcaatttcgtagttgataatcatcatacgcgtatccgtactcgtcctcataaagaacactgcagccattttctatgaacaaatcaataattttaggaacaggatcattgtcattacataattttctataactgaacgatggttttcacatttaacactcaagtcaaatccatgttctaccaacacctttatcaagtcaacgtctacatttttggatttcatatagctgaatatattaaagtcatttatgttgctaaatccagtggcttctagtagagccatcgctatatcctttaactttaacatgtctactatttgtgtattcttctaatggggtagctgtctccaatttttgcgtaatggattagtgccactgtctagtagtagtttgacgacctcgacattattacaatgctcattaaaaaggtatgcgtgtaaagcattattcttgaattggttcctggtatcattaggatctctgtctctcaacatctgtttaagttcatcgagagccacctcctcattttccaaatagtcaaacattttgactgaatagaagtgaatgagctactgtgaactctatacacccacacaactaatgtcattaaatattatttttttgaatgtatttataccatgtcaaaaacttgtacaattattaataaaaataatttagtgtttaaattttaccagttccagattttacacctccgttaaccccactttttacaccactggacgaccctcctccccacattccaccgccaccagatgtataagttttagatcctttattactaccatcatgtccatggataaagacactccacatgccgccactaccccctttagaagacatattaataagacttaagagttaaggacaagtttaacaataaaattaatcacgagtaccctactaccaacctacactattatatgattatagtttctatttttacagtaccttaactaaagtttctagtcacaagagcaatactaccaacctacactattatatgattatagtttctatttttataggaacgcgtacgagaaaatcaaatgtctaatttctaacggtagtgttgataaacgattatcgtcaatggatacctcctctatcatgtcgtctattttcttactttgttctattaacttattagcattatatattatttgattataaaacttatattgcttattagcccaatctgtaaatatcggattattaacatatcgtttctttgtaggtttatttaacttgtacatcactgtaagcatgtccgtaccatttattttaatttgacgcatatccgcaatttctttttcgcagtcggttataaattctatatatgatggatacatgctacatgtgtacttataatcgactaatatgaagtacttgatacatattttcagtaacgatttattattaccacctatgaataagtacctgtgatcgtctaggtaatcaactgttttcttaatacattcgatggttggtaatttactcagaataatttccaatatcttaatatataattctgctatttctggaatatatttatctgccagtataacacaaatagtaatacatgtaaacccatattttgttattatattaatgtctgcgccattatctattaaccattctactaggctgacactatgcgacttaatacaatgataaagtatactacatccatgtttatctattttgtttatatcatcaatatacggcttacaaagttttagtatcgataacacatccaactcacgcatagagaaggtagggaataatggcataatatttattaggttatcatcattgtcattatctacaactaagtttccattttttaaaatatactcgacaactttaggatctctattgccaaatttttgaaaatatttatttatatgcttaaatctatataatgtagctccttcatcaatcatacatttaataacattgatgtatactgtatgataagatacatattctaacaatagatcttgtatagaatctgtatatcttttaagaattgtggatattaggatattattacgtaaactattacacaattctaaaatataaaacgtatcacggtcgaataatagttgatcaactatataattatcgattttgtgatttttcttcctaaactgtttacgtaaatagttagatagaatattcattagttcatgaccactatagttactatcgaataacgcgtcaaatatttcccgtttaatatcgcatttgtcaagataataatagagtgtggtatgttcacgataagtataataacgcatctctttttcgtgtgaaattaaatagtttatcacgtccaaagatgtagcataaccatcttgtgacctagtaataatataataatagagaactgttttacccattctatcatcataatcagtggtgtagtcgtaatcgtaatcgtctaattcatcatcccaattataatattcaccagcacgtctaatctgttctattttgatcttgtatccatactgtatgttgctacatgtaggtattcctttatccaataatagtttaaacacatctacattgggatttgatgttgtagcgtatttctctacaatattaataccatttttgatactatttatttctatacctttcgaaattagtaatttcaataagtctatatcgatgttatcagaacatagatattcgaatatatcaaaatcattgatatttttatagtcgactgacgacaataacaaaatcacaacatcgtttttgatattattatttttcttggtaacgtatgcctttaatggagtttcaccatcatactcatataatggatttgcaccactttctatcaatgattgtgcactgctggcatcgatgttaaatgttttacaactatcatagagtatcttatcgttaaccatgattggttgttgatgctatcgcattttttggtttctttcatttcagttatgtatggatttagcacgtttgggaagcataagctcatatgatttcagtactgtagtgtcagtactattagtttcgatcagatcaatgtctagatctatagaatcaaaacacgataggtcagaagataatgaatatctgtaggcttcttgttgtactgtaacttctcgttttgttagatggttgcatcgtgctttaacatcaatggtacaaattttatcctcgctttgtgtatcatattcgtccctactataaaattgtatattcagattatcatgagatgtgtatacgctaacggtatcaataaacggagcacaccatttagtcataaccgtaatccaaaaatttttaaagtatatcttaacgaaagaagttgtgtcattgtctacggtgtatggtactagatcctcataagtgtatatatctagagtaatgtttaatttatcaaatggttgataatatggatcctcatggcaatttcctaagacgaaaataagacataaacacgcaataaatctaattgcggacatggttactccttaaaaaaatactaataatcaccttggctatttagtaagtgtcatttaacactatactcatattaatccatggactcataatctctatacgggattaacggatgttctatatacggggatgagtagttctcttctttaactttatactttttactaatcatatttagactgatgtatgggtaatagtgtttgaagagctcgttctcatcatcagaataaatcaatatctctgtttttttgttatacagatgtattacagcctcatatattacgtaatagaacgtgtcatctaccttattaactttcaccgcatagttgtttgcaaatacggttaatcctttgacctcgtcgatttccgaccaatctgggcgtataatgaatctaaactttaatttcttgtaatcattcgaaataatttttagtttgcatccgtagttatcccctttatgtaactgtaaatttctcaacgcgatatctccattaataatgatgtcgaattcgtgctgtatacccatactgaatggatgaacgaataccgacggcgttaatagtaatttactttttcatctttacatattgggtactagttttactatcataagtttataaattccacaagctactatggaataagccaaccatcttagtataacacacatgtcttaaagtttattaattaattacatgttgttttatatatcgctacgaatttaaacagagaaatcagtttaggaaaaaaaattatctatctacatcatcacgtctctgtattctacgatagagtgctactttaagatgagacatatccgtgtcatcaaaaatatactccattaaaatgattattccggcagcgaacttgatattggatatatcacaacctttgttaatatctacgacaatagacagcagtcccatggttccataaacagtgagtttatctttctttgaagagatattttgtagagatcttataaaactgtcgaatgacatcgcatttatatctttagctaaatcgtatatgttaccatcgtaatatctaaccgcgtctatcttaaacgtttccatcgctttaaagacgtttccgatagatggtctcatttcatcagtcatactgagccaacaaatataatcgtgtataacatctttgatagaatcagactctaaagaaaacgaatcggctttattatacgcattcatgataaacttaatgaaaaatgtttttcgttgtttaagttggatgaatagtatgtcttaataattgttattatttcattaattaatatttagtaacgagtacactctataaaaacgagaatgacataactaatcataactagttatcaaagtgtctaggacgcgtaattttcatatggtatagatcctgtaagcattgtctgtattctggagctattttctctatcgcattagtgagttcagaatatgttataaatttaaatcgaataacgaacataactttagtaaagtcgtctatattaactcttttattttctagccatcgtaataccatgtttaagatagtatattctctagttactacgatctcatcgttgtctagaatatcacatactgaatctacatccaattttagaaattggtctgtgttacatatctcttctatattattgttgatgtattgtcgtagaaaactattacgtagaccattttctttataaaacgaatatatagtactccaattatctttaccgatatatttgcacacataatccattctctcaatcactacatctttaagattttcgttgttaagatatttggctaaactatataattctattagatcatcaacagaatcagtatatatttttctagatccaaagacgaactctttggcgtcctctataatattcccagaaaagatattttcgtgttttagtttatcgagatctgatctgttcatatacgccatgattgtacggtacgttatgataaccgcataaaataaaaatccattttcatttttaaccaatactattcataattgagattgatgtaatactttgttactttgaacgtaaagacagtacacggatccgtatctccaacaagcacgtagtaatcaaatttggtgttgttaaacttcgcaatatttatcaatttagatagaaacttatactcatcatctgttttaggaatccatgtattattaccactttccaacttatcattatcccaggctatgtttcgtccatcatcgttgcgcagagtgaataattcttttgtattcggtagttcaaatatataatccatgcatagatcggtaaagctattgtagatgtgatttttcctaaatctaatataaaactcgtttactagcaaacactttcctgatttatcgaccaagacacatatggtttctaaatctatcaagtggtggggatccatagttatgacgcagtaacatagattattaccttcttaactgtcgctaatatctatatatttattgttatcgtattggattctgcatatagatggcttgtatgtcaaagatatagaacacataaccaatttatagtcgcgctttacattctcgaatctaaagttaagagatttagaaaacattatatcctcggatgatgttatcactgtttctggagtaggatatattaaagtctttacagatttcgtccgattcaaataaatcactaaataatatcccacattatcatctgttagagtagtatcattaaatctattatattttatgaaagatatatcactgctcacctctatatttcgtacatttttaaactgtttgtataatatctctctgatacaatcagatatatctattgtgtcggtagacgataccgttacatttgaattaatggtgttccattttacaacttttaacaagttgaccaattcatttctaatagtatcaaacgctccatgattaaatattttaatagtatccattttatatcactacggacacaaagtagctgacataaaccattgtataatttttatgttttatgtttattagcgtacacattttggaagttccggcttccatgtatttcctggagagcaagtagatgatgaggaaccagataggttatatccgtacttgcacttaaagtttacattgtcgttgtatgagtatgatcttttaaacccgctagacaagtatccgtttgatattgtaggatgtggacatttaacaatctgacacgtgggtggatcggaccattctcctcctgaacacaggacaccagagttaccaatcaacgaatatccactattgcaactataagttacaacgcttccatcggtataaaaatcctcgtatccgttatgtcttccgttggatatagatggaggggattggcatttaacagattcacaaataggtgcctcgggattccataccatagatccagtagatcctaattcacaatacgatttagattcaccgatcaaatgatatccgctattacaagagtacgttatactagagccaaagtctactccgccaatatcaagttggccattatcgatatctcgaggcgatgggcatctccgtttaatacattgattaaagagtgtccatccagtacctgtacatttagcatatataggtcccattttttgctttctgtatccaggtagacatagatattctatagtgtctcctatgttgtaattagcattagcatcagtctccacactattcttaaatttcatattaatgggtcgtgacggaatagtacagcatgatagaacgcatcctattcccaacaatgtcaggaacgtcacgctctccaccttcatatttatttatccgtaaaaatgttatcctggacatcgtacaaataataaaaagcccatatatgttcgctattgtagaaattgtttttcacagttgctcaaaaacgatggcagtgacttatgagttacgttacactttggagtctcatctttagtaaacatatcataatattcgatattacgagttgacatatcgaacaaattccaagtatttgattttggataatattcgtattttgcatctgctataattaagatataatcaccgcaagaacacacgaacatctttcctacatggttaaagtacatgtacaattctatccatttgtcttccttaactatatatttgtatagataattacgagtctcgtgagtaattccagtaattacatagatgtcgccgtcgtactctacagcataaactatactatgatgtctaggcatgggagacttttttatccaacgatttttagtgaaacattccacatcgtttaatactacatatttttcatacgtggtataaactccacccattacatatatatcatcgtttacgaataccgacgcgcctgaatatctaggagtaattaagtttggaagtcttatccatttcgaagtgccgtgtttcaaatattctgccacacccgttgaaatagaaaattctaatcctcctattacatataactttccattgttaacacaagtactaacttctgattttaacgacgacatattagtaaccgttttccattttttcgtttcaagatctacccgcgatacggaataaacatgtctattgttaatcatgccgccaataatgtatagacaattatgtaaaacatttgcattatagaattgtctatctgtattaccgactatcgtccaatattctgttctaggagagtaatgggttattgtggatatataatcagagtttttaatgactactatattatgttttataccatttcgtgtcactggctttgtagatttggatatagttaatcccaacaatgatatagcattgcgcatagtattagtcataaacttgggatgtaaaatgttgatgatatctacatcgtttggatttttatgtatccactttaataatatcatagctgtaacatcctcatgatttacgttaacgtcttcgtgggataagatagttgtcagttcatcctttgataattttccaaattctggatcggatgtcaccgcagtaatattgttgattatttctgacatcgacgcattatatagttttttaattccatatcttttagaaaagttaaacatccttatacaatttgtggaattaatattatgaatcatagtttttacacatagatctactacaggcggaacatcaattattatggcagcaactagtatcatttctacattgtttatggtgatgtttatcttcttccagcgcatatagtctaatagcgattcaaacgcgtgatagtttataccattcaatataatcgcttcatcctttagatggtgatcctgaatgcgtttaaaaaaattatacggagatgccgtaataatttccttattcacttgtataatttccccattgatagaaaatatcacgctttccattcttgaagtactataagtaattatagtataatgtaaaggtttatatattcaatattttttataaaaaaatcatttcgacattaattcctttttaaatttccgtctatcatctatagaaacatattctatgaatttataaaatgcttttacgtgtcctatcgtaggcgatagaaccgctaaaaagcctattgaatttctacaaaagaatctattatatggtatagggagagtataaaacattaaatgcccgtacttattaaagtattcagtagccaatcctaactctttcgaatacttattaatggctcttgttctgtacgaatctatttttttgaacaacggacctagtggtatatcttgttctatgtatctaaaataatgtctgactagatccgttagtttaatatcctcagtcatcttgtctagaatggcaaatctaactgcgggtttaggctttagtttagtttttatatctacatctatgtctttatctaacaccaaaaatataatagctaatattttattacaatcatccggatattcttctacgatctcactaactaatgtttctttggttatactagtatagtcactatcggacaaataaagaaaatcagatgatcgatgaataatacatttaaattcatcatctgtaagatttttgagatgtctcattaaaatattattagggtcagtactcattatcattaggcagctattacttattttattatttttcaccatatagatcaatcattagatcatcaaaatatgtttcaatcatcctaaagagtatggtgaatgactcttcccatctaatttctgaacgttcaccaatgtctctagccactttggcactaatagcgatcattcgcttagcgtcttctatattattaactggttgattcaatctatctagcaatggaccgtcggacagcgtcattctcatgttcttaatcaatgtacatacatcgccgtcatctaccaattcatccaacaacataagctttttaaaatcatcattataataggtttgatcgttgtcatttctccaaagaatatatctaataagtagagtcctcatgcttagtaatttaactattttagttaacaactattttttatgttaaatcaattagtacaccgctatgtttaatacttattcatattttagtttttaggattgagaatcaatacaaaaattaatgcatcattaattttagaaatacttagtttccacgtagttaatgaaacatttgaactcatcgtacaagacgttctcgtacaggacgtaactataaaccggtttatatttgttcaagatagatacaaatccgataactttttttacgaattctacgggatccactttaaaagtgtcataccgggttctttttatttttttaaacagatcaatggtgtgatgttgattaggtcttttacgaatttgatatagaatagcgtttacatattctccataatggtcaatcgccatttgttcgtatgtcataaattctttaattatatgacactgtgtattgtttagttcatccttgttcattgttaggaatctatccaaaatggcaattatactagaactataggtgcgttgtatacacatattgatgtgtctgtttatacaatccatgatatttggatccatgctactaccttcgggtaaaattgtagcatcatataccatttctagtactttaggttcattattatccattgcagaggacgtcatgatcgcatcctaaaaaaatatattatttttatgttattttgttaaaaataatcatcgaatacttcgtaagatactccttcatgaacataatcagttacaaaacgtttatatgaagtaaagtatctacgatttttacaaaagtccggatgcataagtacaaagtacgcgataaacggaataataatagatttatctagtctatctttttctatagctttcatagttagatacatggtctcagaagtaggattatgtaacatcagcttcgataaaatgactgggttatttagtcttacacattcgctcatacatgtatgaccgttaactacagagtctacactaaaatgattgaacaatagatagtctaccattgtttcgtattcagatagtacagcgtagtacatggcatcttcacaaattatatcattgtctaatagatatttgacgcatcttatggatcccacttcaacagccatcttaaaatcggtaaaatcatattgctttcctttatcattaataatttctaaaacatcatctctatcataaaagatacaaatattaactgtttgatccgtaataacattgctagtcgatagcaatttgttaataagatgcgctgggctcaatgtcttaataagaagtgtaagaggactatctccgaatttgttttgtttattaacatccgttgatggaagtaaaagatctataatgtctacattcttgactgttttagagcatacaatatggagaggtgtatttccatcatgatctggttttgagggactaattcctagtttcatcatccatgagattgtagaagcttttggattgtctgacataagatgtctatgaatatgatttttgccaaatttatccactatcctggcttcgaatccgatggacattatttttttaaacactctttctgaaggatctgtacacgccaacaacggaccacatccttcttcatcaaccgagttgttaatcttggctccatactgtaccaataaatttattctctctatgacttcatcatctgttcccgagagataatatagaggcgttttatgctgtttatcacacgcgtttggatctgcgccgtgcgtcagcagcatcgcgactattctattattattaattttagaagctatatgcaatggataatttccatcatcatccgtctcatttggagagtatcctctatgaagaagttcttcgacaaatcgttcatctagtcctttaattccacaatacgcatgtagaatgtgataattatttccagaaggttcgatagcttgtagcatattcctaaatacatctaaatttttactattatatttggcataaagagatagataatactcggccgacataatgttgtccattgtagtataaaaattaatatttctatttctatttctgtatatttgcaacaatttactctctataacaaatatcataacttagttcttttatgtcaagaaggcactggtttagttcatctataaatgtcacgccataactaccacgcatgctatactcagaattatgataaagatatttatccttggggtgtaggtaatggggattaatctttgttggatcagtctctaagttaacacatgtcacacatgatccatttatagttatatcacacgatgatgatttatgaattgattccggaagatcgctatcgtattttgtggttccacaattcatttccatacatgttattgtcacactaatattatgatgaactttatctagccgctgagtggtaaacaacagaacagatagtttattatctttaccaacaccctcagccgctgccacaaatctctgatccgtatccatgatggtcatgtttatttctagtccgtatccagtcaacactatgttagcatttctgtcgatatagctttcactcatatgacactcaccaataatagtagaattaatgtcgtaatttacaccaatagtgagttcggcggcaaagtaccaataccggtaatcttgtcgaggaggacatatagtattcttgtattctaccgaatacccgagagatgcgatacaaaagagcaagactaatttgtaaaccatcttactcaaaatatgtaacaatagtacgatgcaatgagtaagacaataggaaatctatcttatatacacataattattctatcaattttaccaattagttagtgtaatgttaacaaaaatgtgggagaatctaattagtttttctttacacaattgacgtacatgagtctgagttccttgtttttgctaattatttcatccaatttattattcttgactatatcgagatcttttgtataggagtcagacttgtattcaacatgcttttctataatcattttagctatttcggcatcatccaatagtacattttccagattagcagaatagatattaatgtcgtatttgaacagagcctgtaacatctcaatgtctttattatctatagccaatttaatgtccggaatgaagagaagggaattattggtgtttgtcgacgtcatatagtcgagcaagagaatcatcatatccacgtgtccattttttatagtggtgtgaatacaactaaggagaatagccagatcaaaagtagatggtatttctgaaagaaagtatgatacaatacttacatcattaagcatgacggcatgataaaatgaagttttccatccagttttcccatagaacatcagtctccaatttttcttaacaaacagttttaccgtttgcatgttaccactatcaaccgcataatacaatgcagtgtttcccttgtcatcaaattgtgaatcatccagtccactgaatagcaaaatctttactattttggtatcttccaatgtggctgcctgatgtaatggaaattcattctctagaagatttttcaatgctccagcgttcaacaacgtacatactagacgcacgttattatcagctattgcataatacaaggcactatgtccatggacatccgccttaaatgtatctttactagagagaaagcttttcagctgcttagacttccaagtattaattcgtgacagatccatgtctgaaacgagacgctaattagtgtatattttttcattttttataattttgtcatattgcaccagaattaataatatctctaatagatctgattagtagatacatggctatcgcaaaacaacatatacacatttaataaaaataatatttattaagaaaattcagatttcacgtacccatcaatataaataaaataatgattccttacaccgtacccatattaaggagattccaccttacccataaacaatataaatccagtaatatcatgtctaatgatgaacacaaatggtgtattaaattccagtttttcaggagatgatctcgccgtagctaccataatagtagatgcctctgctacagttccttgttcgtcgacatctatctttgcattctgaaacattttataaatatataatgggtccctagtcatatgtttaaacgacgcattatctggattaaacatactaggagccatcatttcggctatcgacttaatatccctcttattttcgatagaaaatttagggagtttaagattgtacactttattccctaattgaaacgaccaatagtctaattttgcagccgtaatagaatctgtgaaatgggtcatattatcacctattgccaggtacatactaatattagcatccttatacggaaggcgtaccatgtcatattctttgtcatcgattgtgattgtatttccttgcaatttagtaactacgttcatcatgggaaccgttttcgtaccgtacttattagtaaaactagcattgcgtgttttagtgatatcaaacggatattgccatgtacctttaaaatatatagtattaatgattgcccatagagtattattgtcgagcatattagaatctactacattagacataccggatctacgttctactatagaattaattttattaaccgcatctcgtctaaagtttaatctatataggccgaatctatgatattgttgataatacgacggtttaatacacacagtattatctacgaaactttgataagttagatcagtgtacgtatatttagatgttttcagcttagctaatcctgatattaattctgtaaatgctggacccagatctctttttctcaaatccatagtcttcaataattctattctagtattacctgatgcaggcaatagcgacataaacatagaaaacgaatagccaaacggcgagaagacaatattatcatcttgaatatttttatacgctactataccggcattggtaaatccttgcagacgataggtagacgctgaacacgttaacgatagtatcaataacgcaatcatgattttatggtattaataattaaccttatttttatgttcggtataaaaaaattattgatgtctacacatccttttgtaattgacatctatatatccttttgtataatcaactctaatcactttaacttttacagttttccctaccagtttatccctatattcaacatatctatccatatgcatcttaacactctctgccaagatagcttcagagtgaggatagtcaaaaagataaatatatagagcataatccttctcgtatactctgccctttattacatcgcccgcattgggcaacgaataacaaaatgcaagcatcttgttaacgggctcgtaaattgggataaaaattatgtttttatatctattttattcaagagaatattcaggaatttctttttccggttgtatctcgtcgcagtatatatcatttgtacattgtttcatattttttaatagtttacaccttttagtaggactagtatcgtacaattcatagctgtattttgaattccaatcacgcataaaaatatcttccaattgttgacgaagacctaatccatcatccggtgtaatattaatagatgctccacatgtatccgtaaagtaatttcctgtccaatttgaggtacctatataggccgttttatcggttaccatatatttggcatggtttaccctagaatacggaatgggaggatcagcatctggtacaataaatagctttacttctatatctatgtttttagattttagcatagcgatagatcttaaaaagtttctcatgataaacgaagatcgttgccagcaactaatcaatagcttaacggatacttgtctgtctatagcggatcttcttaattcatcttctatataaggccaaaacaaaattttacccgccttcgaataaataatagggataaagttcataacagatacataaacgaatttactcgcatttctaatacatgacaataaagcggttaaatcattggttctttccatagtacatagttgttgcggcgcagaagcaataaatacagagtgtggaacaccacttacgttaatactaagaggatgatctgtattataatacgacggataaaagtttttccaattatatggtagattgttaactccaagataccagtatacctcaaaaatttgagtgagatccgctgccaagttcctattattgaagatcgcaatacccaattctttgacctgagttagtgatctccaatccatgttagcgcttcctaaataaatatgtgtattatcagatatccaaaattttgtatgaagaactcctcctaggatatttgtaatatctatgtatcgtacttcaactccggccatttgtagtctttcaacatcctttaatggtttgttagatttattgacggctactctaactcttactcctcttttgggtaattgtacaatctcgtttaatattatcgtgccgaaattcgtacccacttcatccgataaactccaataaaaagatgatatatctagtgtttttgtggtattggatagaatttccctccacatgttaaatgtagacaaatatactttatcaaattgcatacctataggaatagtctctgtaatcactgcgattgtattatccggattcattttatttgttaaaaaataatcctatatcacttcactctattaaaaatccaagtttctatttctttcatgactgattttttaacttcatccgtttccttatgaagatgatgtttggcaccttcataaatttttatttctctattacaatttgcatgttgcatgaaataatatgcacctaaaacatcgctaatctcattgtttgttccctggagtatgagagtcgggggggtgttaatcttggaaattatttttctaaccttgttggtagccttcaagacctgactagcaaatccagccttaattttttcatgattgattaatgggtcgtattggtatttataaactttatccatatctctagatactgattctggacatagctttccgactggcgcatttggtgtgatggttcccataagtttggcagctagcagattcagttttgaaacagcatctgcattaactagaggagacattagaatcattgctgtaaacaagtttggattatcgtaagaggctagtatagaaattgttgctcccatggaatgacccaataagtagatttaatagttaccacgtgctgtaccaaagtcatcaatcatcattttttcaccattacttcttccatgtccaatatgatcatgtgagaatactaaaattcctaacgatgatatgttttcagctagttcgtcataacgtccagaatgtttaccagctccatgacttatgaatactaatgccttaggatatgtaataggtttccaatatttacaatatatgtaatcattgtccagattgaacatacagtttgcactcatgattcacgttatataactatcaatattaacagttcgtttgatgatcatattatttttatgttttattgataattgtaaaaacatacaattaaatcaatatagaggaaggagacggatactgtcttttgtgagatagtcatggcgactaaatcagattatgaggatgctgttttttactttgtggatgatgataaaatatgtagtcgcgactccatcatcgatctaatagatgaatatatcacgtggagaaatcatgttatagtgtttaacaaagatattaccagttgtggaagactgtacaaggaattgatgaagttcgatgatgccgctatacagtactatggtattgataaaattaatgagattgtcgaagctatgagcgaaggagaccactacatcaattttacaaaagtccatgatcaggaaagtttattcgctaccataggaatatgtgctaaaatcactgaacattggggatacaaaaagatttcagaatctagattccaatcattgggaaacattacagatctgatgaccgacgataatataaacatcttgatactttttctagaaaaaaaattgaattgatgatataggggtcttcataacgcataattattacgttagcattctatatccgtgttaaaaaaaattatcctatcatgtatttgagagttttatatgtagcaaacatgatagctgtgatgccaataagctttagatattcacgcgtgctagtgttagggatggtattatctggtggtgaaatgtccgttatataatctacaaaacaatcatcgcatatagtatgcgatagtagagtaaacatttttatcgtttctactgggttcatacatcgtctacccaattcggttatgaatgaaattgtcgccaatcttacacccaaacccttgttatccattagcatagtattaacttcgttatttatgtcataaactgtaaatgattctgtagatgccatatcatacatgatattcatgtccctattataatcattactaactttatcacaatatatgttgataatatctatatatgatctagtctttgtgggcaactgtctatacaagtcgtctaaacgttgtttactcatatagtatcgaacagccatcattacatggtcccgttccgttgatagataatcgagtatgttagtggacttgtcaaatctatataccatattttctggaagtggatatacatagtcgtgatcaacattattgctagcctcatcttctatatcctgtactataccattatctatatcatctacataatctacgatattattatacataaacatcgacaacatactattgtcaattatctaagtcctgttgatccaaacccttgatctcctctatctgtactatctagagattgtacttcttccagttctggataatatatacgttgatagattagctgggctattctatcccccgtatttacattaaacgtacattttccattattaataagaataactcctatgtttcccctataatcttcgtctattacaccgcctcctatatcaatgccttttagggacagaccagacctaggagctattctaccatagcagaacttaggcatggacatactaatatctgtcttaattaactgtcgttctccaggagggatagtataatcgtaagcgctatataaatcatatccggcggcgtaaggtgattgcctagtaggagatttagctctgttagtttccttaacaaatctaactggtgagttaatattcatgttgaacataaaactaatattttatttcaaaattatttaccatcccatatattccatgaataagtgtgatgattgtacacttctatagtatctatatacgattcacgataaaatcctcctatcaatagcagtttattatccactatgatcaattctggattatccctcggataaataggatcatctatcagagtccatgtattgctggattcacaataaaattccgcatttctaccaaccaagaataaccttctaccgaacactaacgcgcatgatttataatgaggataataagtggatggtccaaactgccactgatcatgattgggtagcaaatattctgtagttgtatcagtttcagaatgtcctcccattacgtatataacattgtttatagatgccactgctggattacatctaggtttcagaagactcggcatattaacccaagcagcatccccgtggaaccaacgctcaacagatgtgggatttggtagacctcctactacgtataatttattgttagcgggtatcccgctagcatacagtctggggctattcatcggaggaattggaatccaattgtttgatatataatttacagctatagcattgttatgtatttcattgttcatccatccaccgatgagatatactacttctccaacatgagtacttgtacacatatggaatatatctataatttgatccatgttcataggatactctatgaatggatacttgtatgatttgcgtggttgtttatcacaatgaaatattttggtacagtctagtatccattttacattatttatacctctgggagaaagataatttgacctgattacatttttgataaggagtagcagatttcctaatttatttcttcgctttatataccacttaatgacaaaatcaactacataatcctcatctggaacatttagttcatcgctttctagaataagtttcatagatagataatcaaaattgtctatgatgtcatcttccagttccaaaaagtgtttggcaataaagtttttagtatgacataagagattggatagtccgtattctatacccatcatgtaacactcgacacaatattcctttctaaaatctcgtaagataaagtttatacaagtgtagatgataaattctacagaggttaatatagaagcacgtaataaattgacgacgttatgactatctatatatacctttccagtatatgagtaaataactatagaagttaaactgtgaatgtcaaggtctagacaaacccttgtaactggatctttatttttcgtgtatttttgacgtaaatgtgtgcgaaagtaaggagataactttttcaatatcgtagaattgactattatattgccacctatagcatcaataattgttttgaatttcttagtcatagacaatgctaatatattcttacagtacacagtattaacaaatatcggcatttatgtttctttaaaagtcaacatctagagaaaaatgattatctttttgagacataactcccattttttggtattcacccacacgtttttcgaaaaaattagtttttccttccaatgatatattttccatgaaatcaaacggattggtaacattataaatttttttaaatcccaattcagaaatcaatctatccgcgacgaattctatatatgttttcatcatttcacaattcattcctataagtttaactggaagagccgcagtaagaaattcttgttcaatggatactgcatctgttataatagatctaacggtttcttcactcggtggatacaataaatgtttaaacatcaaacatgcgaagtcgcagtgtagaccctcgtctctactaattagttcgttggaaaacgtgagtccgggcattaggccacgctttttaagccaaaatatggaagcgaatgatccggaaaagaagattccttctactgcagcaaaggcaataagtctctctccataaccggcgctgtcatgtatccacttttgagcccaatcggccttcttttttacacaaggcattgtttctatggcattaaagagatagtttttttcattactatctttaacataagtatcgatcaaaagactatacatttccgaatgaatgttttcaatggccatctgaaatccgtagaaacatctagcctcggtaatctgtacttctgtacaaaatcgttccgccaaattttcattcactattccgtcactggctgcaaaaaacgccaatacatgttttataaaatatttttcgtctggtgttagtttattccaatcattgatatctttagatatatctacttcttccactgtccaaaatgatgcctctgcctttttatacatgttccagatgtcatgatattggattgggaaaataacaaatctatttggatttggtgcaaggatgggttccataactaaattaacaatatcaataaattttttttcagttatctatatgcctgtacttggattttttgtacatcgatatcgccgcaatcactacaataattacaagtattattgatagcattgttattagtactatcataattaaattatcgacattcatgggtgctgaataatcgttattatcatcattatcattttgtaattgtgacatcatactaaataaatcgtttgcgagattgttgtgggaagcgggcatggaggatgcattatcattattatttaacgccttccatttggattcacaaatatggcgcgcgttcaacattttatggaaactataattttgtgaaaacagataacaagaaaactcgtcatcgttcaaatttttaacgatagtaaaccgattaaacgtcgagctaatttctaacgctagcgactctgttggatatgggtttccagatatatatcttttcagttcccctacgtatctataatcatctgtaggaaatggaagatatttccatttatctactgttcctaatatcatatgtggtggtgtagtagaaccattaagcgcgaaagatgttatttcgcatcgtattttaacttcgcaataatttctggttagataacgcactctaccagtcaagtcaatgatattagcctttacagatatattcatagtagtcgtaacgatgactccatcttttagatgcgatactcctttgtatgtaccagaatcttcgtacctcaaactcgatatatttaaacaagttaatgagatattaacgcgttttatgaatgatgatatataaccagaagttttatcctcggtggctagcgctataaccttatcattataataccaactagtgtgattaatatgtgacacgtcagtgtgggtacaaatatgtacattatcgtctacgtcgtattcgatacatccgcatacagccaacaaatataaaatgacaaatactctaacgccgttcgtacccatcttgatgcggtttaataaatgttttgatttcaatttattgtaaaaaaagattcggttttatactgttcgatattctcattgcttatattctcatctatcatctccacacagtcaaatccgtggttagcatgcacctcatcaaccggtaaaagactatcggactcttctatcattataactctagaatatttaatttggtcattattaatcaagtcaattatcttatttttaacaaacgtgagtattttactcattttttataaaaacttttagaaatatacagactctatcgtgtgtctatatcttctttttatatccaatgtatttatgtctgatttttcttcatttatcatatataatggtccaaattctacacgtgcttcggattcatccagatcattaaggttcttataattgtaacatccttctcttccctcttctacatcttccttcttattcttattcttagcgtcacagaatctaccacagcaggatcccatgacgagcgtcatattaaactaatccattttcaattataatatatgattagtaatgaccattaaaataaaaaatattcttcataaccggcaagaaagtgaaaagttcacattgaaactatgtcagtagtatacatcatgaaatgatgatatatatatactctattttggtggaggattatatgatataattcgtggataatcattcttaagacacatttcttcattcgtaaatcttttcacgttaaatgagtgtccatattttgcaatttcttcatatgatggcggtgtacgtggacgaggctgctcctgttcttgttgtggtcgccgactgtcgtgtttgcgtttatccctccattatcgcgattgcgtagatggagtactattatataccttgtaattaaatttttttattaattaaacgtataaaaacgttccgtatctgtatttaagagccagatttcgtctaatagaacaaatagctacagtaaaaataactagaataattgctacacccactagaaaccacggatcgtaatacggcaatcggttttcgataataggtggaacgtatattttatttaaggacttaacaattgtctgtaaaccacaatttgcttccgcggatcctgtattaactatctgtaaaagcatatgttggccgggcggagccgaacattctccgatatccaatttctgtatatctataatattattaacctccgcatacgcattacagttcttttctagcttggataccgcactaggtacatcgtctagatctattcctatttcctcagcgatagctcttctatccttttccggaagcaatgaaatcacttcaataaatgattcaaccatgagtgtgaaactaagtcgagaattactcatgcatttgttagttattcggagcgcgcaatttttaaactgtcctataacctctcctatatgaatagcacaagtgacattagtagggatagaatgttgagctaatttttgtaaataactatctataaaaagattatacaaagttttaaactctttagtttccgccatttatccagtctgagaaaatgtctctcataataaatttttccaagaaactaattgggtgaagaatggaaacctttaatctatatttatcacagtctgttttggtacacatgatgaattcttctaatgccgtactaaattcgatatctttttcgatttctggatatgtttttaataaagtatgaacaaagaaatggaaatcgtaataccagttatgtttaactttgaaattgttttttattttcttgttaatgattccagccacttgggaaaagtcaaagtcgtttaatgccgatttaatacgttcattaaaaacaaactttttatcctttagatgaattattattggttcattggaatcaaaaagtaagatattatcgggtttaagatctgcgtgtaaaaagttgtcgcagcatggtagttcgtagattttaatgtataacagagccatctgtaaaaagataaactttatgtattgtaccaaagatttaaatcctaatttgatagctaactcggtatctactttatctgccgaatacagtgctaggggaaaaattataatgtttcctctttcgtattcgtagttagttctcttttcatgttcgaaaaagtgaaacatgcggttaaaatagtttataacattaatattactgttaataactgccgggtaaaagtgggatagtaatttcacgaatttgatactgtcctttctctcgttaaacgcctttagaaaaactttagaagaatatctcaatgatagttcctgaccatccatagtttgtatcaataatagcaacatatgaagaacacgtttatacagagtatgtaaaaatgttaatttatagtttaatcccatggcccacgcacacacgattaattttttttcatctccctttagattgttgtatagaaatttgggtactgtgaactccgccgtagtttccatgggactatataattttgtggcctcgaatacaaattttactacatagttatctatcttaaaaactataccatatcctcctgtagatatgtgataaaaatcgtcgtttataggataaaatcgtttatccttttgttggaaaaaggatgaattaatgtaatcattctcttctatctttagtagtgtttccttattaaaattcttaaaataatttaacaatctaactgacggagcccaattttggtgtaaatctaattgggacattatattgttaaaatacaaacagtctcctaatataacagtatctgataatctatggggagacatccattgatattcaggggatgaatcattggcaacacccatttattgtacaaaaagccccaatttacaaacgaaagtccaggtttgatagagacaaactattaactattttgtctctgtttttaacacctccacagtttttaatttctttagtaatgaaattattcacaatatcagtatcttctttatctaccagagattttactaacttgataaccttggctgtctcattcaatagggtagtaatatttgtatgtgtgatattgatatctttttgaattgtttcttttagaagtgattctttgatggtgccagcatacgaattacaataatgcagaaactcggttaacatgcaggaattatagtaagccaattccaattgttgcctgtgttgtattagagtgtcaatatgagcaatggtgtccttgcgtttctctgatagaatgcgagcagcgattttggcgttatcatttgacgatatttctggaatgacgaatcctgtttctactaactttttggtaggacaaagtgaaacaatcaagaagatagcttctcctcctatttgtggaagaaattgaactcctctagatgatctactgacgatagtatctccttgacagatattggaccgaattacagaagtacctggaatgtaaagccctgaaaccccctcattttttaagcagattgttgccgtaaatcctgcactgtgaccaagatagagagctcctttggtgaatccatctctatgtttcagtttaaccaagaaacagtcagctggtctaaaatttccatctctatctaatacagcatctaacttgatgtcaggaactatgaccggtttaatgttatatgtaacattgagtaaatccttaagttcataatcatcactgtcatcagttatgtacgatccaaacaatgtttctactggcatagtggatacgaagatgctatccatcagaatgtttccctgattagtattttctatatagctattcttctttaaacgattttccaaatcagtaactatgttcatttttttaggagtaggacgcctagccagtatggaagaggattttctagatcctctcttcaacatctttgatctcaatggaatgcaaaaccccatagtgaaacaaccaacgataaaaataatattgtttttcactttttataattttaccatctgactcatggattcattaatatctttataagagctactaacgtataattctttataactgaactgagatatatacaccggatctatggtttccataattgagtaaatgaatgctcggcaataactaatggcaaatgtataaaacaacgaaattatactagagttgttaaagttaatattttctatgagctgttccaataaattatttgttgtgactgcgttcaagtcataaatcatcttgatactatccagtaaacagtctttaagttctggaatattatcatcccattgtaaagcccctaattcgactatcgaatatcctgctctgatagcagtttcaatatcgacggacgtcaatactgtaataaaggtggtagtattgtcatcatcgtgataaactacgggaatatggtcgttagtaggtacggtgactttacacaacgcgatatataactttccttttgtaccatttttaacgtagttgggacgtcctgcagggtattgttttgaagaaatgatatcgagaacagatttgatacgatatttgttggattcctgattattcactataatataatctagacagatagatgattcgataaatagagaaggtatatcgttggtaggataatacatccccattccagtattctcggatactctattgatgacactagttaagaacatgtcttctattctagaaaacgaaaacatcctacatggactcattaaaacttctaacgctcctgattgtgtctcgaatgcctcgtacaaggatttcaaggatgccatagattctttgaccaacgatttagaattgcgtttagcatctgatttttttattaaatcgaatggtcggctctctggtttgctaccccaatgataacaatagtcttgtaaagataaaccgcaagaaaatttatacgcatccatccaaataaccctagcaccatcggatgatattaatgtattattatagattttccatccacaattattgggccagtatactgttagcaacggtatatcgaatagattactcatgtaacctactagaatgatagttcgtgtactagtcataatatctttaatccaatctaagaaatttaaaattagattttttacactgttaaagttaacaaaggtattacccggatacgtggatatcatatatggcattggtccattatcagtaatagctccataaactgatacggcgatggtttttatatgtgtttgatctaacgaggaagaaattcgcgcccacaattcatctctagatatgtatttaatatcaaacggtaacacatcaatttcgggacgcgtatatgtttctaaatttttaatccaaatataatgatgacctatatgccctattatcatactgtcaactatagtacacctagagaacttacgatacatctgtttcctataatcgttaaattttacaaatctataacatgctaaaccttttgacgacaaccattcattaatttctgatatggaatctgtattctcgataccgtattgttctaaagccagtgctatatctccctgttcgtgggaacgctttcgtataatatcgatcaacggataatctgaagtttttggagaataatatgactcatgatctatttcgtccataaacaatctagacataggaattggaggcgatgatcttaattttgtgcaatgagtcgtcaatcctataacttctaatattgtaatattcatcatcgacataacactatctatgttatcatcgtatattagtataccacggccttcttcatttcgtgccaaaataatatacagtcttaaataattacgcaatatctcaatagtttcataattgttagctgttttcatcaaggtttgtatcctgtttaacatgatggcgttctataacgtctctattttctatttttaattttttaaatttttaacgatttactgtggctagatacccaatctctctcaaatatttttttagcctcgcttacaagctgtttatctatactattaaaactgacgaatccgtgattttggtaatgggttccgtcgaaatttgccgaagtgatatgaacatattcgtcgtcgactatcaacaattttgtattattctgaatagtgaaaaccttcacagatagatcattttgaacacacaacgcgtctagacttctggcggttgccatagaatatacgtcgttcttatcccaattaccaactagaagtctgatcttaactcctctattaatggctgcttctataatggagttgtaaatgtcaggccaatagtagctattaccgtcgacacgtgtagtgggaactatggccaaatgttcaatatctatactagtcttagccgacttgagtttatcaataactacatcagtgtctagatctctagaatatcccaataggtgttctggagaatcagtaaagaacactccacctataggattcttaatatgatacgcagtgctaactggcagacaacaagccgcagagcataaattcaaccatgaattttttgcgctattaaaggctttaaaagtatcaaatcttctacgaagatctgtggccagcgggggataatcagaatatacacctaacgttttaatcgtatgtatagatcctccagtaaatgacgcgtttcctacataacatctttcatcatctgacacccaaaaacaaccgagtagtagtcccacattattttttttatctatattaacggttataaaatttatatccgggcagtgactttgtagctctcccagatttcttttccctcgttcatctagcaaaactattattttaatccctttttcagatgcctcttttagtttatcaaaaataagcgcgcccctagtcgtactcagaggattacaacaaaaagatgctatgtatatatatttcttagctagagtgataatttcgttaaaacattcaaatgttgttaaatgatcggatctaaaatccatattttctggtagtgtttctaccagcctacattttgctcccgcaggtaccggtgcaaatggccacatttagttaacataaaaacttatacatcctgttctatcaacgattctagaatatcatcggctatatcgctaaaattttcatcaaagtcgacatcacaacctaactcagtcaatatattaagaagttccatgatgtcatcttcgtttatttctatatccgtatccattgtagattgttgaccgattatcgagtttaaatcattactaatactcaatccttcagaatacaatctgtgtttcattgtaaatttataggcggtgtatttaagttggtagattttcaattatgtatcaatatagcaacagtagttcttgctcctccttgattctagcatcctcttcattattttcttctacgtacataagcatgtccaatacgttagacaacacaccgacgatggcggccgccacagacacgaatatgactagaccgatgaccatttaaaaacccctctctagctttcacttaaactgtatcgattattcttttagaacatgtataatataaaaacattattctatttcgaatttaggcttccaaaaatttttcatccgtaaaccgataataatatatatagacttgttaatagtcggaataaatagattaatgcttaaactatcatcatctccacgattagagatacaatatttacattctttttgctgtttcgaaactttatcaatacacgttaatacaaacccaggaaggagatattgaaactgaggctgttgaaaatgaaacggtgaatacaataattcagataatgtaaaatcatgattccgtattctgatgatattagaactgctaatggatgtcgatggtatgtatctaggagtatctattttaacaaagcatcgatttgctaatatacaattatcattttgattaattgttattttattcatattcttaaaaggtttcatatttatcaattcttctacattaaaaatttccatttttaatttatgtagccccgcaatactcctcattacgtttcattttttgtctataatatccattttgttcatctcggtacatagattatccaattgagaagcgcatttagtagttttgtacattttaagtttattgacgaatcgtcgaaaactagttatagttaacattttattatttgataccctgatattaatacccctgccgttactattatttataactgatgtaacccacgtaacattagaattaattatcgatagtaatgcatcgacgcttccaaaattgtctattataaactcaccgataatttttttattgcatgttttcatattcattaggattatcaaatctttaatcttattacgattgtatgcgttgatattacaagacgtcattctaaaagacggaggatctccatcaaatgccagacaatcacgtacaaagtacatggaaataggttttgttctattgcgcatcatagattcatatagaacacccatagaaatactaatttgttttactctataaaatactaatgcatctatttcatcgttttgtataacgtctttccaagtgccaaattccaaatttttttcattgatagtaccaaattcttctatctctttaactacttgcatagataggtaattacagtgatgcctacatgccgttttttgaaactgaatagatgcgtctagaagcgatgctacactagtcacaatcaccactttcatatttagaatatatgtatgtaaaaatatagtagaatttcattttgtttttttctatgctataaatgaattctcattttgcatctgctcatactccgttttatatcaataccaaagaaggaagatatctggttctaaaagccgttaaagtatgcgatgttagaactgtagaatgcgaaggaagtaaagcttcctgcgtactcaaagtagataaaccctcatcgcccgcgtgtgagagaagaccttcgtccccgtccagatgcgagagaatgaataaccctggaaaacaagtcccgtttatgaggacggacatgctacaaaatatgttcgcggctaatcgcgataatgtagcttctagacttttgtcctaaaatactattatatccttttcgatattaataaatccgtgtcgtccaggttttttatctctttcagtatgtgaatagataggtattttatctctattcatcatcgaatttaagagatccgataaacattgtttgtattctccagatgtcagcatctgatacaacaatatatgtgcacataaacctctggcacttatttcatgtaccttccccttatcactaaggagaatagtatttgagaaatatgtatacatgatattatcatgaattagatatacagaatttgtaacactctcgaaatcacacgatgtgtcggcgttaagatctaatatatcactcgataacacattttcatctagatacactagacattttttaaagctaaaatagtctttagtagtgacagtaactatgcgattattttcatcgatgatacatttcatcggcatattattacgcttaccatcaaagactataccatgtgtatatctaacgtattctagcatggttgccatacgtgcattaaacttttcaggatctttggatagatcttccaatctatctatttgagaaaacatttttatcatgttcaatagttgaaacgtcggatccactatatagatattatctataaagattttaggaactacgttcatggtatcctggcgaatattaaaactatcaatgatatgattatcgttttcatcttttatcaccatatagtttctaagatatgggattttacttaatataatattatttcccgtgataaattttattagaaaggccaaatctataagaaaagtcctagaattagtctgaagaatatctatatcgccgtaccgtatatttggattaattagatatagagaatatgatccgtaacatatacaacttttattatggcgtctaagatattcttccatcaacttattaacatttttgactagggaagatacattatgacgtcccattacttttgccttgtctattactgcgacgttcatagaatttagcatatctcttgccaattcttccattgatgttacattataagaaattttagatgaaattacatttggagctttaatagtaagaactcctaatatgtccgtgtatgtggtcactaatacagattgtagttctataatcgtaaataatttacctatattatatgtttgagtctgtttagaaaagtagctaagtatacgatcttttatttctgatgcagatgtatcaacatcggaaaaaaatctttttttattcttttttactaaagatacaaatatgtctttgttaaaaacagttattttctgaatatttctagcttgtaattttaacatatgatattcgttcacactaggtactctgcctaaataggtttctataatctttaatgtaatattaggaagagtattctgatcaggattcctattcattttgaggatttaaaactctgattattgtctaatatggtctcaacacaaactttttcacagagcgatagagtttttgataactcgtttttcttaagaaatataaaactactgtttccagagctcgctctatcttttattttatctaattcgatacaaactcctgatactggttcagaaagtaattcattaattttcagtcctttatagaagatatttaatatagataatacaaaattttcagttcttgatatcgatctgattgatcctagaactagatatattaataacgtgctcattaggcagtttatggcagcttgataattagatatagtatattccagttcatatttattagataccgcattgcccagattttgatattctatgaattcctctgaaaataaatccaaaataactagacattctattttttgtggattagtgtactctcttccctctatcatgttcactactggtgtccacgatgataaatatctagagggaatataatatagtccataggatgccaatctagcaatgtcgaataactgtaatttgattcttcgttcttcattatgaattgattcttgaggtataaacctaacacaaattatattattagacttttcgtatgtaatgtctttcatgttataagtttttaatcctggaatagaatctattttaatgaggcttttaaacgcagagttctccaacgagtcaaagcataatactctgttgtttttcttatatacgatgttacgattttcttctttgaatggaataggtttttgaattagtttataattacaacataatagataaggaagtgtgcaaatagtacgcggaaaaaacataatagctcccctgttttcatccatggttttaagtaaatgatcactggcttctttagtcaatggatattcgaacattaaccgtttcatcatcattggacagaatccatatttcttaatgtaaagagtgatcaaatcattgtgtttattgtaccatcttgttgtaaatgtgtattcggttatcggatctgctcctttttctattaaagtatcgatgtcgatctcgtctaagaattcaactatatcgacatatttcatttgtatacacataaccattactaacgtagaatgtataggaagagatgtaacgggaacagggtttgttgattcgcaaactattctaatacataattcttctgttaatacgtcttgcacgtaatctattatagatgccaagatatctatataattattttgtaagatgatgttaactatgtgatctatataagtagtgtaataattcatgtatttcgatatatgttccaactctgtctttgtgatgtctagtttcgtaatatctatagcatcctcaaaaaatatattcgcatatattcccaagtcttcagttctatcttctaaaaaatcttcaacgtatggaatataataatctattttacctcttctgatatcattaatgatatagtttttgacactatcttctgtcaattgattcttattcactatatctaagaaacggatagcgtccctaggacgaactactgccattaatatctctattatagcttctggacataattcatctattataccagaattaatgggaactattccgtatctatctaacatagttttaagaaagtcagaatctaagacctgatgttcatatattggttcatacatgaaatgatctctattgatgatagtgactatttcattctctgaaaattggtaactcattctatatatgctttccttgttgatgaaggatagaatatactcaatagaatttgtaccaacaaactgttctcttatgaatcgtatatcatcatctgaaataatcatgtaaggcatacatttaacaattagagacttgtctcctgttatcaatatactattcttgtgataatttatgtgtgaggcaaatttgtccacgttctttaattttgttatagtagatatcaaatccaatggagctacagttcttggcttaaacagatatagtttttctggaacgaattctacaacattattataaaggactttgggtagataagtgggatgaaatcctattttaattaatgcgatagccttgtcctcgtgcagatatccaaacgcttttgtgatagtatggcattcattgtctagaaacgctctacgaatatctgtgacagatatcatctttagagaatatactagtcgcgttaatagtactacaatttgtattttttaatctatctcaataaaaaaattaatatgtatgattcaatgtataactaaactactaactgttattgataactagaatcagaatctaatgatgacgtaaccaagaagtttatctactgccaatttagctgcattatttttagcatctcgtttagattttccatctgccttatcgaatactcttccgtcgatgtctacacaggcataaaatgtaggagagttactaggccccactgattcaatacgaaaagaccaatctctcctagtaatttggcagtactcattaataacggtgacagggttagcacctttccaatcaataatttttttagccggaataacatcatcaaaagacttatgatcctctctcattgatttttcgcgggatacatcatctattatggcgtcagccataacatcagcatccggcttatccgcctccgttgtcataaaccaacgaggaggaatatcgtcggagctgtacaccatagcactacgttgaagatcgtacagagctttattaacttctcgcttctccatattaagttgtctagttagttgtgcagcagtagctccttcgattccaatggttttaatagcctcacacacaatctctgcgttagaacgttcgtcgatatagattttagacatttttagagagaactaacacaaccagcaataaaactgaacctactttatcatttttttattcatcatcctctggtggttcgtcgttcctatcgaatgtggatctgattaacccgtcatctataggtgatgctggttctggagattctggaggagatggattattatctggaagaatctctgttatttccttgttttcatgtatcgattgcgttgtaacattaagattgcgaaatgctctaaatttgggaggcttaaagtgttgtttgcaatctctacacgcatgtctaactagtggaggttcgtcagcggctctagtttgaatcatcatcggcgtagtattcctacttttacagttaggacacggtgtattgtatttctcgtcgagaacgttaaaataatcgttgtaactcacatcctttattttatctatattgtattctactcctttcttaatgcattttataccgaataagagatagcgaaggaattctttttcggtgccgctagtacccttaatcatatcacatagtgttttatattccaaatttgtggcaatagacggtttatttctatacgatagtttgtttctggaatcctttgagtattctataccaatattattctttgattcgaatttagtttcttcgatattagattttgtattacctatattcttgatgtagtactttgatgatttttccatggcccattctattaagtcttccaagttggcatcatccacatattgtgatagtaattctcggatatcagtagcggctaccgccattgatgtttgttcattggatgagtaactactaatgtatacattttccatttataacacttatgtattaactttgttcatttatattttttcattattatgttgatattaacaaaagtgaatatatatgttaataattgtattgtggttatacggctacaatttcataatgagtggaagtcagtgtccgatgatcaatgacgatagctttactctgaaaagaaagtatcaaatcgatagtgcggagtcaacaataaaaatggataagaagaggataaagtttcagaatagagccaaaatggtaaaagaaataaatcagacaataagagcagcacaaactcattacgagacattgaaactaggatacataaaatttaagagaatgattaggactactactctagaagatatagcaccatctattccaaataatcagaaaacttataaactattctcggacatttcagccatcggcaaagcatcacagaatccgagtaagatggtatatgctctgctgctttacatgtttcccaatttgtttggagatgaccatagattcattcgttatagaatgcatccaatgagtaaaatcaaacacaagatcttctctcctttcaaacttaatcttattagaatattagtggaagaaagattctataataatgaatgcagatctaataaatggagaataattggaacacaagttgataaaatgttgatagctgaatctgataaatatacaatagatgcaaggtataacctaaaacccatgtatagaatcaagggaaaatctgaagaagataccctcttcatcaaacagatggtagaacaatgtgtgacatcccaggaattggtggaaaaagtgttgaagatactgtttagagatttgttcaagagtggagaatacaaagcatacagatacgatgatgatgtagaaaatggatttattggattggatacactaaaattaaacattgttcatgatatagttgaaccatgtatgcctgttcgtaggccagtggctaagatactgtgtaaagaaatggtaaataaatactttgagaatccgctacatattattggtaaaaatcttcaagagtgcattgactttgttagtgaataggcatttcatctttctccaatactaattcaaattgttaaattaataatggatagtataaatagttattagtgataaaatagtaaaaataattattagaataagagtgtagtatcatagataactctcttctataaaaatggattttattcgtagaaagtatcttatatacacagtagaaaataatatagattttttaaaggatgatacattaagtaaagtaaacaattttaccctcaatcatgtactagctctcaagtatctagttagcaattttcctcaacacgttattactaaggatgtattagctaataccaatttttttgttttcatacatatggtacgatgttgtaaagtgtacgaagcggttttacgacacgcatttgatgcacccacgttgtacgttaaagcattgactaagaattatttatcgtttagtaacgcaatacaatcgtacaaggaaaccgtgcataaactaacacaagatgaaaaatttttagaggttgccgaatacatggacgaattaggagaacttataggcgtaaattatgacttagttcttaatccattatttcacggaggggaacccatcaaagatatggaaatcatttttttaaaactgtttaagaaaacagacttcaaagttgttaaaaaattaagtgttataagattacttatttgggcatacctaagcaagaaagatacaggcatagagtttgcggataatgatagacaagatatatatactctatttcaacaaactggtagaatcgtccatagcaatctaacagaaacgtttagagattatatctttcccggagataagactagctattgggtgtggttaaacgaaagtatagctaatgatgcggatatcgttcttaatagacacgccattaccatgtatgataaaattcttagttatatatactctgagataaaacaaggacgcgttaataaaaacatgcttaagttagtttatatctttgagcctgaaaaagatatcagagaacttctgctagaaatcatatatgatattcctggagatatcctatctattattgatgcaaaaaacgacgattggaaaaaatattttattagtttttataaagctaattttattaacggtaatacatttattagtgatagaacgtttaacgaggacttattcagagttgttgttcaaatagatcccgaatatttcgataatgaacgaattatgtctttattctctacgagtgctgcggacattaaacgatttgatgagttagatattaataacagttatatatctaatataatttatgaggtgaacgatatcacattagatacaatggatgatatgaagaagtgtcaaatctttaacgaggatacgtcgtattatgttaaggaatacaatacatacctgtttttgcacgagtcggatcccatggtcatagagaacggaatactaaagaaactgtcatctataaaatccaagagtagacggctgaacttgtttagcaaaaacattttaaaatattatttagacggacaattggctcgtctaggtcttgtgttagatgattataaaggagacttgttagttaaaatgataaaccatcttaagtctgtggaggatgtatccgcattcgttcgattttctacagataaaaaccctagtattcttccatcgctaatcaaaactattttagctagttataatatttccatcatcgtcttatttcaaaggtttttgagagataatctatatcatgtagaagaattcttggataaaagcatccatctaaccaagacggataagaaatatatacttcaattgataagacacggtagatcatagaacagaccaaatatattattaataatttgtatatacatagatataattatcacatattaaaaattcacacatttttgataaatgggaactgctgcaacaattcagactcccaccaaattaatgaataaagaaaatgcagaaatgattttggaaaaaattgttgatcatatagttatgtatattagtgacgaatcaagtgattcagaaaataatcctgaatatattgattttcgtaacagatacgaagactatagatctctcattataaaaagtgatcacgagtttgtaaagctatgtaaaaatcatgcagagaaaagttctccagaaacgcaacaaatgattatcaaacacatatacgaacaatatcttattccagtatctgaagtactattaaaacctataatgtccatgggtgacataattacatataacggatgtaaagacaatgaatggatgctagaacaactctctaccctaaactttaacaatctccgcacatggaactcatgtagcataggcaatgtaacgcgtctgttttatacattttttagttatctgatgaaagataaactaaatatataagtataatcccattctaatactttaacctgatgtattacctgcatcttattagaatattaacctaactaaaagacataacataaaaactcattacatagttgataaaaagcggtaggatataaatattatggctgccaccgttccgcgttttgacgacgtgtacaaaaatgcacaaagaagaattctagatcaagaaacattttttagtagaggtctaagtagaccgttaatgaaaaacacatatctatttgataattacgcgtatggatggataccagaaactgcaatttggagtagtagatacgcaaacttagatgcaagtgactattatcccatttcgttgggattacttaaaaagttcgagtttctcatgtctctatataaaggtcctattccagtatacgaagaaaaagtaaatactgaattcatagccaatggatcgttctctggtagatacgtatcatatcttcgaaagttttctgctcttccaacaaacgagtttattagttttttgttactgacttccattccaatctataatatcttgttctggtttaaaaatactcagtttgatattactaaacacacattattcagatacgtctatacagataatgccaaacacctggcgttggctaggtatatgcatcaaacaggagactataagcctttgtttagtcgtctcaaagagaattatatatttaccggtcccgttccaataggtatcaaagatatagatcaccctaatcttagtagagcaagaagtccatccgattatgagacattagctaatattagtactatattgtactttaccaagtatgatccggtattaatgtttttattgttttacgtacctgggtattcaattactacaaaaattactccagccgtagaatatctaatggataaactgaatctaacaaagagcgacgtacaactgttgtaaattattttatgcttcgtaaaatgtaggttttgaaccaaacattctttcaaagaatgagatgcataaaactttattatccaatagattgactatttcggacgtcaatcgtttaaagtaaacttcgtaaaatattctttgatcactgccgagtttaaaacttctatcgataattgtctcatatgttttaatatttacaagttttttggtccatggtacattagccggacaaatatatgcaaaataatatcgttctccaagttctatagtttctggattatttttattatattcagtaaccaaatacatattagggttatctgcggatttataatttgagtgatgcattcgactcaacataaataattctagaggagacgatctactatcaaattcggatcgtaaatctgtttctaaagaacggagaatatctatacatacctgattagaattcatccgtccttcagacaacatctcagacagtctggttttgtacatcttaatcatattcttatgaaacttggaaacatctcttctagtttcactagtacctttattaattctctcaggtacagattttgaattcgacgatgccgagtatttcatcgttgtatatttcttcttcgattgcataatcagattcttatataccgcctcaaactctattttaaaattattaaacaatactctactattaatcagtcgttctaactctttcgctatttctatagacttatctacatcttgactgtctatctctgtaaacacggagtcggtatctccatacacgctacgaaaacgaaatctgtaatctataggcaacgatgttttcacaatcggattaatatctctatcgtccatataaaatggattacttaatggattggcaaaccgtaacataccgttagataactctgctccatttagtaccgattctagatacaagatcattctacgtcctatggatgtgcaactcttagccgaagcgtatgagtatagagcactatttctaaatcccatcagaccatatactgagttggctactatcttgtacgtatattgcatggaatcataaatggccttttcagttgaactggtagcctgttttaacatctttttatatctggctctctctgccaaaaatgttcttaatagtctaggaatggttccttctatcgatctatcgaaaattgctatttcagagatgaggttcggtagtctaggttcacaatgaaccgtaatatatctaggaggtggatatttctgaagcaatagctgattatttatttcttcttccaatctattggtactaacaacgacaccgactaatgtttccggagatagatttccaaagatacacacattaggatacagactgttataatcaaagattaatacattattactaaacattttttgttttggagcaaataccttaccgccttcataaggaaacttttgttttgtttctgatctaactaagatagttttagtttccaacaatagctttaacagtggacccttgatgactgtactcgctctatattcgaataccatggattgaggaagcacatatgttgacgcacccgcgtctgtttttgtttctactccataatactcccacaaatactgacacaaacaagcatcatgaatacagtatctagccatatctaaagctatgtttagattataatccttatacatctgagctaaatcaacgtcatcctttccgaaagataatttatatgtatcattaggtaaagtaggacataatagtacgactttaaatccattttcccaaatatctttacgaattactttacatataatatcctcatcaacagtcacataattacctgtggttaaaacctttgcaaatgcagcggctttgcctttcgcgtccgtagtatcgtcaccgatgaacgtcatttctctaactcctctatttaatactttacccatgcaactgaacgcgttcttggatatagaatccaatttgtacgaatccaatttttcagatttttgaatgaatgaatatagatcgaaaaatatagttccattattgttattaacgtgaaacgtagtattggccatgccgcctactcccttatgactagactgatttctctcataaatacagagatgtacagcttcctttttgtccggagatctaaagataatcttctctcctgttaataactctagacgattagtaatatatctcagatcaaagttatgtccgttaaaggtaacgacgtagtcgaacgttagttccaacaattgtttagctattcgtaacaaaactatttcagaacatagaactagttctcgttcgtaatccatttccattagtgactgtatcctcaaacatcctctatcgacggcttcttgtatttcctgttccgttaacatctcttcattaatgagcgtaaacaataatcgtttaccacttaaatcgatataacagtaacttgtatgcgagattgggttaataaatacagaaggaaacttcttatcgaagtgacactctatatctagaaataagtacgatcttgggatatcgaatctaggtatttttttagcgaaacagttacgtggatcgtcacaatgataacatccattgttaatctttgtcaaatattgctcgtccaacgagtaacatccgtctggagatatcccgttagaaatataaaaccaactaatattgagaaattcatccatggtggcattttgtatgctgcgtttctttggctcttctatcaaccacatatctgcgacggagcattttctatctttaatatctagattataacttattgtctcgtcaatgtctatagttctcatctttcccaacggcctcgcattaaatggaggaggagacaatgactgatatatttcgtccgtcactacgtaataaaagtaatgaggaaatcgtataaatacggtctcaccatttcgacatctggatttcagatataaaaatctgttttcaccgtgactttcaaaccaattaatgcaccgaacatccatttatagaatttagaaatatattttcatttaaatgaatcccaaacattggggaagagccgtatggaccattatttttatagtactttcgcaagcgggtttagacggcaacatagaagcgtgtaaacgaaaactatatactatagtcagcactcttccatgtcctgcatgtagacggcacgcgactatcgctatagaggacaataatgtcatgtctagcgatgatctgaattatatttattattttttcatcagattatttaacaatttggcatctgatcccaaatacgcgatcgatgtgacaaaggttaaccctttataaacttaacccattataaaacttatgattagtcacaactgaaataaccgcgtgattattttttggtataattctacacggcatggtttctgtaactatgaattcaacccccgttacattagtgaaatctttaacaaacagcaagggttcgtcaaagacataaaactcattgtttacaatcgaaatagaccccctatcacacttaaaataaaaaatatccttatcctttaccaccaaataaaattctgattggtcaatgtgaatgtattcacttaacagttccacaaatttatttattaactccgaggcacatacatcgtcggtattttttatggcaaactttactcttccagcatccgtttctaaaaaaatattaacgagttccatttatatcatccaatattattgaaatgacgttgatggacagatgatacaaataagaaggtacggtacctttgtccaccatctcctccaattcatgctctattttgtcattaactttaatgtatgaaaacagtacgccacatgcttccatgacagtgtgtaacactttggatacaaaatgtttgacattagtataattgttcaagactgtcaatctataatagatagtagctataatatattctatgatggtattgaagaagatgacaaccttggcatattgatcatttaacacagacatggtatcaacagatagcttgaatgaaagagaatcagtaattggaataagcgtcttctcgatagagtgtccgtataccaacatgtctgatattttgatgtattccattaaattatttagttttttctttttattttcgttaaacagcatttctgtcaacggaccccaacatcgttgaccgattaagttttgattgatttttccgtgtaatgcgtatctagtcagatcgtatagcctatccaataatccatcatctgtgcgtagatcacatcgtacactttttaattctctatagaagagcgacagacatctggagcaattacagacagcaatttctttattctctacagatgtaagatacttgaagacattcctatgatgatgcagaattttggataacacggtattgatggtatctgttaccataattcctttgatggctgatagtgtcagagcacaagatttccaatctttgacaatttttagcaccattatctttgttttgatatctatatcagacagcatggtgcgtctgacaacacagggattaagacggaaagatgaaatgattctctcaacatcttcaatggataccttgctattttttctggcattatctatatgtgcgagaatatcctctagagaatcagtatcctttttgatgatagtggatctcaatgacatgggacgtctaaaccttcttattttatcaccagattgcatggtgatttgtcttctttcttttatcataatgtaatctctaaattcatcggcaaattgtctatatctaaaatcataatatgagatgtttacctctacaaatatctgttcgtccaatgttagagtatctacatcagttttgtattccaaattaaacatggcaacggatttaattttatattcctctattaagtcctcgtcgataataacagaatgtagataatcatttaatccatcgtacatggttggaagatgcttgttgacaaaatctttaattgtcttgatgaaggtgggactatatctaacatcttgattaataaaatttataacattgtccataggatactttgtaactagttttatacacatctcttcatcggtaagtttagacagaatatcgtgaacaggtggtatattatattcatcagatatacgaagaacaatgtccaaatctatattgtttaatatattatatagatgtagcgtagctcctacaggaatatctttaactaagtcaatgatttcatcaaccgttagatctattttaaagttaatcatataggcattgatttttaaaaggtatgtagccttgactacattctcattaattaaccattccaagtcactgtgtgtaagaagattatattctatcataagcttgactacatttggtcccgataccattaaagaattcttatgatataaggaaacagcttttaggtactcatctactctacaagaattttggagagccttaacgatatcagtgacgtttattatttcaggaggaaaaaacctaacattgagaatgtcggagttaatagcttccagatacagtgattttggcaatagtccgtgtaatccataatccagtaacacgagctggtgcttgctagacaccttttcaatgtttaatttttttgaaataagctttgataaagccttcctcgcaaattccggatacatgaacatgtcggcgacatgattaagtattgttttttcattatttttatattttctcaacaagttctcaataccccaatagatgatagaatatcacccaatgcgtccatgttgtctatttccaacaggtcgctatatccaccaatagaagtttttccaaaaaagattctaggaacagttctaccaccagtaatttgttcaaaatagtcacgcaattcattttcgggtttaaattctttaatatcgacaatttcatacgctcctcttttgaaactaaacttatttagaatatccagtgcatttctacaaaaaggacatgtatacttgacaaaaattgtcactttgttattggccaacctttgttgtacaaattcctcggccattttaatatttaagtgatataaaactatctcgacttatttaactctttagtcgagatatatggacgcagatagctatatgatagccaactacagaaggcaaacgctataaaaaacataattacgacgagcatatttataaatatttttattcagcattacttgatatagtaatattaggcacagtcaaacattcaaccactctcgatacattaactctctcattttctttaacaaattctgcaatatcttcgtaaaaagattcttgaaactttttagaatatctatcgactctagatgaaatagcgttcgtcaacatactatgttttgtatacataaaggcgcccattttaacagtttctagtgacaaaatgctagcgatcctaggatcctttagaatcacatagattgacgattcgtctctcttagtaactctagtaaaataatcatacaatctagtacgcgaaataatattatccttgacttgaggagatctaaacaatctagttttgagaacatcgataagttcatcgggaatgacatacatactatctttaatagaactcttttcatccagttgaatggattcgtccttaaccaactgattaatgagatcttctattttatcattttccagatgatatgtatgtccattaaagttaaattgtgtagcgcttctttttagtctagcagccaatactttaacatcactaatatcgatatacaaaggagatgatttatctatggtattaagaattcgtttttcgacatctgtcaaaaccaattcctttttgcctgtatcatccagttttccatcctttgtaaagaaattattttctactagactattaataagactgataaggattcctccataattgcacaatccaaactttttaacaaaactagactttacaagatctacaggaatgcgtacttcaggtttcttagcttgtgattttttcttttgtggacattttcttgtgaccaactcatctaccatttcattgattttagcagtgaaataagctttcaatgcacgggcactgatactattgaaaacgagttgatcttcaaattccgccatttaagttcaccaaacaacttttaaatacaaatatatcaatagtagtagaataagaactataaaaaaaataataattaaccaataccaaccccaacaaccggtattattagttgatgtgactgttttctcatcacttagaacagatttaacaatttctataaagtctgtcaaatcatcttccggagaccccataaatacaccaaatatagcggcgtacaacttatccatttatacattgaatattggcttttctttatcgctatcttcatcatattcatcatcaatatcaacaagtcccagattacgagccagatcttcttctacattttcagtcattgatacacgttcactatctccagagagtccgataacgttagccaccacttctctatcaatgattagtttcttgagtgcgaatgtaatttttgtttccgttccggatctatagaaaactacaggtgtgataattgccttggccaattgtctttctcttttactgagtgattctagttcaccttctatagatctgagaatggatgattctccagtcgaaacatattctaccatggatccgtttaatttgttgatgaagatggattcatccttaaatgttttctctgtaatagtttccaccgaaagactatgcaaagaatttggaatgcgttccttgtgcttaatgtttccatagacggcttctagaagttgatacaacataggactagccgcggtaacttttatttttagaaagtatccatcgcttctatcttgtttagatttatttttataaagtttagtctctccttccaacataataaaagtggaagtcatttgactagataaactatcagtaagttttatagagatagacgaacaattagcgtattgagaagcatttagtgtaacgtattcgatacattttgcattagatttactaatcgattttgcatactctataacacccgcacaagtctgtagagaatcgctagatgcagtaggtcttggtgaagtttcaactctcttcttgattaccttactcatgattaaacctaaataattgtactttgtaatataatgatatatattttcactttatctcatttgagaataaaaatgtttttgtttaaccactgcatgatgtacagatttcggaatcgcaaaccaccagtggttttattttatccttgtccaatgtgaattgaatgggagcggatgcgggtttcgtacgtagatagtacattcccgtttttagaccgagactccatccgtaaaaatgcatactcgttagtttggaataactcggatctgctatatggatattcatagattgactttgatcgatgaaggctcccctgtctgcagccatttttatgatcgtcttttgtggaatttcccaaatagttttataaactcgcttaatatcttctggaaggtttgtattctgaatggatccaccatctgccataatcctattcttgatctcatcattccataattttctctcggttaaaactctaaggagatgcggattaactacttgaaattctccagacaatactctccgagtgtaaatattactggtatacggttccaccgactcattatttcccaaaatttgagcagttgatgcagtcggcataggtgccaccaataaactatttctaagaccgtatgttctgattttatcttttagaggttcccaattccaaagatccgacggtacaacattccaaagatcatattgtagaataccgttactggcgtacgatcctacatatgtatcgtatggtccttccttctcagctagttcacaactcgcctctaatgcaccgtaataaatggtttcgaagatcttcttatttagatcttgtgcttccaggctatcaaatggataatttaagagaataaacgcgtccgctaatccttgaacaccaataccgataggtctatgtctcttattagagatttcagcttctggaataggataataattaatatctataattttattgagatttctgacaattactttgaccacatccttcagtttgagaaaatcaaatcgcccatctattacaaacatgttcaaggcaacagatgccagattacaaacggctacctcattagcatccgcatattgtattatctcagtgcaaagattactacacttgatagttcctaaattttgttgattactctttttgttacacgcatccttataaagaatgaatggagtaccagtttcaatctgagattctataatcgctttccagacgactcgagcctttattatagatttgtatctcctttctctttcgtatagtgtatacaatcgttcgaactcgtctccccaaacattgtccaatccaggacattcatccggacacatcaacgaccactctccgtcatccttcactcgtttcataaagagatcaggaatccaaagagctataaatagatctctggttctatgttcctcgtttcctgtattctttttaagatcgaggaacgccataatatcagaatgccacggttccaagtatatggccataactccaggccgtttgtttcctccctgatctatgtatctagcggtgttattataaactctcaacattggaataataccgtttgatataccattggtaccggagatatagcttccactggcacgaatattactaattgatagacctattccccctgccattttagagattaatgcgcatcgttttaacgtgtcatagataccctctatgctatcatcgatcatgttaagtagaaaacagctagacatttggtgacgactagttcccgcattaaataaggtaggagaagcgtgcgtaaaccatttttcagaaagtagattgtacgtctcaatagctgagtctatatcccattgatgaattcctactgcgacacgcattaacatgtgctgaggtctttcaacgatcttgttgtttattttcaacaagtaggatttttccaaagttttaaaaccaaaatagttgtatgaaaagtctcgttcgtaaataataaccgagttgagtttatccttatatttgttaactatatccatggtgatacttgaaataatcggagaatgtttcccatttttaggattaacatagttgaataaatcctccatcacttcactaaatagtttttttgtttccttgtgtagatttgatacggctattctggcggctagaatggcataatccggatgttgtgtagtacaagtggctgctatttcggctgccagagtgtccaattctaccgttgttactccattatatattccttgaataaccttcatagctattttaataggatctatatgatccgtgtttaagccataacataattttctaatacgagacgtgattttatcaaacatgacattttccttgtatccatttcgtttaatgacaaacatttttgttggtgtaataaaaaaattatttaacttttcattaatagggatttgacgtatgtagcgtacaaaattatcgttcctggtatatagataaagagtcctatatatttgaaaatcgttacggctcgattaaactttaatgattgcatagtgaatatatcattaggatttaactccttgactatcagggcggcaccagaaattaccatcaaaagcattaatacagttatgccgatcgcagttagaacggttatagcatccaccatttatatctaaaaattagatcaaagaatatgtgacaaagtcctagttgtatactgagaattgacgaaacaatgtttcttacatatttttttcttattagtaactgacttaatagtaggaactggaaagctagacttgattattctataagtatagatacccttccaaataatattctctttgataaaagttccagaaaatgtagaattttttaaaaagttatcttttgctattaccaagattgtgtttagacgcttattattaatatgagtgatgaaatccacaccgcctctagatatcgcttttatttccacattagatggtaaatccaatagtgaaactatctttttaggaatgtatggactcgcgtttagaggagtgaacgtcttaggcgtcggaaaggatgattcatcaaacgaataaacaatttcacaaatggatgttaatgtattagtaggaaattttttgacgctagtggaattgaagattctaatggatgatgttctacctatttcatccgataacatgttaatttccgacaccaacggttttaatatttcgatgatatacggtagtctctctttcggacttatatagcttattccacaatacgagtcattatatactccaaaaaacaaaataactagtataaaatctgtatcgaatgggaaaaacgaaattatcgacataggtatagaatctggaacattgaacgtattaatacttaattctttttctgtggtaagtaccgataggttattgacattgtatggttttaaatattctataacttgagacttgatagatattagtgatgaattgaaaattatttttatcaccacgtgtgtttcaggatcatcgtcgacgcccgtcaaccaaccgaatggagtaaaataaatatcattaatatatgctctagatattagtatttttatcaatcctttgattatcatcttctcgtaggcgaatgattccatgatcaagagtgatttaagaacatcctccggagtattaatgggcttagtaaacagtccatcgttgcaataataaaagttatccaagttaaaggatattatgcattcgtttaaagatatcacctcatctgacggagacaattttttggtaggttttagagactttgaagctacttgtttaacaaagttattcatcgtcgtttactattctatttaattttgtagttaatttatcacatatcacattaattgactttttggtccatttttccatacgtttatattcttttaatcctgcgttatccgtttccgttatatccagggatagatcttgcaagttaaatagaatgctcttaaataatgtcatttttttatccgctaaaaatttaaagaatgtataaacttttttcaaagatttaaaacttttaggtggagttctagtacacaatatcataaacaaactaataaacatcccgcattcagattccaacagctgattaacttccacattaatacagcctattttcgctccaaatgtacattcgaaaaatctgaataaaacatcgatgtcacaatttgtattatccaatacagaatgtctgtgattcgtgttaaaaccatcggagaaggaatagaaataaaaattattatagtggtggaattcagttggaatattgcctccggagtcataaaaggatactaaacattgttttttatcataaattacacatttccaatgagacaaataacaaaatccaaacattacaaatctagaggtagaacttttaattttgtctttaagtatatacgataagatatgtttattcataaacgcgtcaaatttttcatgaatcgctaaggagtttaagaatctcatgtcaaattgtcctatataatccacttcggatccataagcaaactgagagactaagttcttaatacttcgattgctcatccaggctcctctctcaggctctattttcatcttgacgacctttggattttcaccagtatgtattcctttacgtgataaatcatcgattttcaaatccatttgtgagaagtctatcgccttagatactttttcccgtagtcgaggtttaaagaaatacgctaacggtatactagtaggtaactcaaagacatcatatatagaatggtaacgcgtctttaactcgtcggttaactctttcttttgatcgagttcgtcgctactattgggtctgctcaggtgccccgactctactagttccaacatcataccgataggaatacaagacactttgccagcggttgtagatttatcatatttctccactacatatccgttacaatttgttaaaaatttagatacatctatattgctacataatccagctagtgaatatatatgacataataaattggtaaatcctagttctggtattttactaattactaaatctgtatatctttccatttatcatggaaaagaatttaccagatatcttcttttttccaaactgcgttaatgtattctcttacaaatattcacaagatgaattcagtaatatgagtaaaacggaacgtgatagtttctcattggcggtgtttccagttataaaacatagatggcataacgcacacgttgtaaaacataaaggaatatacaaagttagtacagaagcacgtggaaaaaaagtatctcctccatcactaggaaaacccgcacacataaacctaaccgcgaagcaatatatatacagtgaacacacaataagctttgaatgttatagttttctaaaatgtataacaaatacagaaatcaattcgttcgatgagtatatattaagaggactattagaagctggtaatagtttacagatattttccaattccgtaggtaaacgaacagatactataggtgtactagggaataagtatccatttagcaaaattccattggcctcattaactcctaaagcacaacgagagatattttcagcgtggatttctcatagacctgtagttttaactggaggaactggagtgggtaagacgtcacaggtacccaagttattgctttggtttaattatttatttggtggattctctactctagataaaatcactgactttcacgaaagaccagtcattctatctcttcctaggatagctttagttagattgcatagcaataccattttaaaatcattgggatttaaggtactagatggatctcctatttctttacggtacggatctataccggaagaattaataaacaaacaaccaaaaaaatatggaattgtattttctacccataagttatctctaacaaaactatttagttatggcactcttattatagacgaagttcatgagcatgatcaaataggagatattattatagcagtagcgagaaagcatcatacgaaaatagattctatgtttttaatgactgccacgttagaggatgacagggaacggctaaaagtatttttacctaatcccgcatttatacatattcctggagatacactgtttaaaattagcgaggtatttattcataataagataaatccatcttccagaatggcatacatagaagaagaaaagagaaatttagttactgctatacagatgtatactcctcctgatggatcatccggtatagtctttgtggcatccgttgcacagtgtcacgaatataaatcatatttagaaaaaagattaccgtatgatatgtatattattcatggtaaggtcttagatatagacgaaatattagaaaaagtgtattcatcacctaatgtatcgataattatttctactccttatttggaatccagcgttactatacacaatgttacacacatttatgatatgggtagagtttttgtccccgctccttttggaggatcgcaacaatttatttctaaatctatgagagatcaacgaaaaggaagagtaggaagagttaatcctggtacatacgtctatttctatgatctgtcttatatgaagtctatacagcgaatagattcagaatttctacataattatatattgtacgctaataagtttaatctaacactccccgaagatttgtttataatccctacaaatttggatattctatggcgtacaaaggaatatatagactcgttcgatattagtacagaaacatggaataaattattatccaattattatatgaagatgatagagtatgctaaactttatgtactaagtcctattctcgctgaggagttggataactttgagaggacgggagaattaactagtattgtacgagaagccattttatctctaaatttacgaattaagattttaaattttaaacataaagatgatgatacgtatatacacttttgtaaaatattattcggtgtctataacggaacaaacgctactatatattatcatagacctctaacgggatatatgaatatgatttcagatactatatttgttcctgtagataataactaaaaatcaaactctaatgaccacatctttttttagagatgaaaaattttctacatctccttttgtagacacgactaaacattttgcagaaaaaagtttattagtgtttagataatcgtatacttcatcagtgtagatagtaaatgtgaacagataaaaggtattcttgctcaatagattggtaaattccatagaatatattaatcctttcttcttgagatcccacatcatttcaaccagagacgttttatccaatgatttacctcgtactataccacatacaaaactagattttgcagtgacgtcgtacctggtattcctaccaaacaaaattttacttttagttcttttagaaaattctaaggtagaatctctatttgccaatatgtcatctatggaattaccactagcaaaaaatgatagaaatatatattgatacatcgcagctggttttgatctactatactttaaaaacgaatcagattccataattgcctgtatatcatcagctgaaaaactatgttttacacgtattccttcggcatttctttttaatgatatatcttgtttagacaatgataaagttatcatgtccatgagagacgcgtctccgtatcgtataaatatttcattagatgttagacgcttcattaggggtatacttctataaggtttcttaatcagtccatcattggttgcgtcaagaactactatcggatgttgttgggtatctctagtgttacacatggccttactaaagtttgggtaaataactatgatatctctattaattatagatgcatatatttcattcgtcaaggatattagtatcgacttgctatcgtcattaatacgtgtaatgtaatcatataaatcatgcgatagccaaggaaaatttaaatagatgttcatcatataatcgtcgctataattcatattaatacgttgacattgactaatttgtaatatagcctcgccacgaagaaagctctcgtattcagtttcatcgataaaggataccgttaaatataactggttgccgatagtctcatagtctattaagtggtaagtttcgtacaaatacagaatccctaaaatattatctaatgttggattaatctttaccataactgtataaaatggagacggagtcataactattttaccgtttgtacttactggaatagatgaaggaataatctccggacatgctggtaaagacccaaatgtctgtttgaagaaatccaatgttccaggtcctaatctcttaacaaaaattacgatattcgatcccgatatcctttgcattctatttaccagcatatcacgaactatattaagattatctatcatgtctattctcccaccgttatataaatcgcctccgctaagaaacgttagtatatccatacaatggaatacttcatttctaaaatagtattcgttttctaattctttaatgtgaaatcgtatactagaaagggaaaaattatctttgagttttccgttagaaaagaaccacgaaactaatgttctgattgcgtccgattccgttgctgaattaatggatttacaccaaaaactcatataacttctagatgtagaagcattcgctaaaaaattagtagaatcaaaggatataagtagatgttccaacaagtgagcaattcccaagatttcatctatatcattctcgaatccgaaattagaaattcccaagtagatatcctttttcatccgatcgttgatgaaaatacgaactttattcggtaagacaatcatttactaaggagtaaaataggaagtaatgttcgtatgtcgttatcatcgtataaattaaaggtgtgttttttaccattaagtgacattataattttaccaatattggaattataatataggtgtatttgcgcactcgcgacggttgatgcatcggtaaatatagctgtatctaatgttctagtcggtatttcatcatttcgctgtctaataatagcgttttctctatctgtttccattacagctgcctgaagtttattggtcggataatatgtaaaataataagaaatacatacgaataacaaaaataaaataagatataataaagatgccatttagagatctaattttgttcaacttgtccaaattcctacttacagaagatgaggaatcgttggagatagtgtcttccttatgtagaggatttgaaatatcttatgatgacttgataacttactttccagataggaaataccataaatatatttataaagtatttgaacatgtagatttatcggaggaattaagtatggaattccatgatacaactttgcgagatttagtttatcttagattgtacaagtattccaagtgtatacggccgtgttataaattaggagataatctaaaaggcatagttgttataaaggacaggaatatttatattagggaagcaaatgatgacttgatagaatatctcctcaaggaatacactcctcagatttatacatattctaatgagcgcgtccccataactggttcaaaattaattctttgtggattttctcaagttacatttatggcgtatacaacgtcgcatataacaacaaataaaaaggtagatgttctcgtttccaaaaaatgtatagatgaactagtcgatccaataaattatcaaatacttcaaaatttatttgataaaggaagcggaacaataaacaaaatactcaggaagatattttattcggtaaccggtggccaaactccataggtagctttttctatttcggattttagaatttccaaattcaccagcgatttatcggttttggtgaaatccaaggatttattaatgtccacaaatgccatttgttttgtctgtggattgtatttgaaaatggaaacgatgtagttagatagatgcgctgcgaagtttcctattagggttccgcgcttcacgtcacccagcatacttgaatcaccatcctttaaaaaaaatgataagatatcaacatggagtatatcatactcggattttaattcttctactgcatcactgacattttcacaaatactacaatacggtttaccgaaaataatcagtacgttcttcatttatgggtatcaaaaacttaaaatcgttactgctggaaaataaatcactgacgatattagatgataatttatacaaagtatacaatggaatatttgtggatacaatgagtatttatatagccgtcgccaattgtgtcagaaacttagaagagttaactacggtattcataaaatacgtaaacggatgggtaaaaaagggagggcatgtaaccctttttatcgatagaggaagtataaaaattaaacaagacgttagagacaagagacgtaaatattctaaattaaccaaggacagaaaaatgctagaattagaaaagtgtacatccgaaatacaaaatgttaccggatttatggaagaagaaataaaggcaaaaatgcaattaaaaatcgataaacttacatttcaaatatatttatctgattctgataacataaaaatatcattgaatgagatactaacacatttcaacaataatgagaatgttacattattttattgtgatgaacgagacgcagaattcgttatgtgtctcgaggctaaaacacatttctctaccacaggagaatggccgttgataataagtaccgatcaggatactatgctatttgcatctactgataatcatcctaagatgataaaaaacttaactcaactgtttaaatttgttccctcggcagaggataactatttagcaaaattaacggcgttagtgaatggatgtgatttctttcctggactctatggggcatctataacacccaccaacttaaacaaaatacaattgtttagtgattttacaatcgataatatagtcactagtttggcaattaaaaattattatagaaagactaactctaccgtagacgtgcgtaatattgttacgtttataaacgattacgctaatttagacgatgtctactcgtatgttcctccttgtcaatgcactgttcaagaatttatattttccgcattagatgaaaaatggaatgaatttaaatcatcttatttagagaccgttccgttaccctgtcaattaatgtacgcgttagaaccacgtaaggagattgatgtttcagaagttaaaactttatcatcttatatagatttcgaaaatactaaatcagatatcgatgttataaaatctatatcctcgatttttggatattctaacgaaaactgtaacacgatagtattcggcatctataaggataatttactactgagtataaataattcattttactttaacgatagtctgttaataaccaatactaaaagtgataatataataaatataggttactagattaaaaatggtgttccaactcgtgtgctctacatgcggtaaagatatttctcacgaacgatataaattgattatacgaaaaaaatcattaaaggatgtactcgtcagtgtaaagaacgaatgttgtaggttaaaattatctacacaaatagaacctcaacgtaacttaacagtgcaacctctattggatataaactaatatggatccggttaattttatcaagacatatgcgcctagaggttctattatttttattaattataccatgtcattaacaagtcatttgaatccatcgatagaaaaacatgtgggtatttattatggtacgttattatcggaacacttggtagttgaatctacctatagaaaaggagttcgaatagtcccattggatagtttttttgaaggatatcttagtgcaaaagtatacatgttagagaatattcaagttatgaaaatagcagctgatacgtcattaactttattgggtattccgtatggatttggtcatgatagaatgtattgttttaaattggtagctgactgttataaaaatgccggtgttgaaacatcgtctaaacgaatattaggtaaagatatttttctgagccaaaacttcacagacgataatagatggataaagatatatgattctaataatttaacattttggcaaattgattaccttaaagggtgagttaatatgcataactactcctccgttgttttttccctcgttctttttcttaacgttgtttgccatcactctcataatgtaaagatattctaaaatggtaaacttttgcatatcggacgcagaaattggtataaatgttgtaattgtattatttcccgtcaatggactagtcacagctccatcagttttatatcctttagagtatttctcactcgtgtctaacattctagagcattccatgatctgtttatcgttgatattggccggaaagatagattttttattttttattatattactattggcaattgtagatataacttctggtaaatatttttctaccttttcaatctcttctattttcaagccggctatatattctgctatattgttgctagtatcaataccttttcttgctaagaagtcatatgtggtattcactatatcagttttaactggtagttccattagcctttccacttctgcagaataatcagaaattggttctttaccagaaaatccagctactataataggctcaccgatgatcattggcaaaatcctatattgtaccagattaatgagagcatatttcatttccaataattctgctagttcttgagacattgatttatttgatgaatctagttggttctctagatactctaccatttctgccgcatacaataacttgttagataaaatcagggttatcaaagtgtttagcgtggctagaatagtgggcttgcatgtattaaagaatgcggtagtatgagtaaaccgttttaacgaattatatagtctccagaaatctgtggcgttacatacatgagccgaatgacatcgaagattgtccaatatttttaatagctgctctttgtccattatttctatatttgactcgcaacaattgtagataccattaatcactgattcctttttcgatgccggacaatagcacaattgtttagctttggactctatgtattcagaattaatagatatatctcttaatacagattgcactatacattttgaaactatgtcaaaaattgtagaacgacgctgttctgcagccatttaactttaaataatttacaaaaatttaaaatgagcatccgtataaaaatcgataaactgcgccaaattgtggcatatttttcagagttcagtgaagaagtgtctataaatgtagactcgacggatgagttaatgtatatttttgccgccttgggcggatctgtaaacatttgggccattatacctctcagtgcatcagtgttctaccgcggagccgaaaatattgtgtttaatcttccggtgtccaaggtaaaatcgtgtttgtgtagttttcacaatgatgccatcatagatatagaacctgatctggaaaataatctagtaaaactttctagttatcatgtagtaagtgtcgattgtaacaaggaactgatgcctattaggacagatactactatttgtctaagtatagatcaaaagaaatcttacgtgtttaattttcacaagtatgaagaaaaatgttgtggtagaaccgtcattcatttagaatggttgttgggctttatcaagtgtattagtcagcatcagcatttggctattatgtttaaagatgacaatattattatgaagactcctggtaatactgatgcgttttccagggaatattctatgactgaatgttctcaagaactacaaaagttttctttcaaaatagctatctcgtctctcaacaaactacgaggattcaaaaagagagtcaatgtttttgaaactagaatcgtaatggataatgacgataacattctaggaatgttgttttcggatagagttcaatcctttaagatcaacatctttatggcgtttttagattaatactttcaatgagataaatatgggtggcggagtaagtgttgagctccctaaacgggatccgcctccgggagtacccactgatgagatgttattaaacgtggataaaatgcatgacgtgatagctcccgctaagcttttagaatatgtgcatataggaccactagcaaaagataaagaggataaagtaaagaaaagatatccagagtttagattagtcaacacaggacccggtggtctttcggcattgttaagacaatcgtataatggaaccgcacccaattgctgtcgcacttttaatcgtactcattattggaagaaggatggaaagatatcagataagtatgaagagggtgcagtattagaatcgtgttggccagacgttcacgacactggaaaatgcgatgttgatttattcgactggtgtcagggggatacgttcgatagaaacatatgccatcagtggatcggttcagcctttaataggagtgatagaactgtagagggtcaacaatcgttaataaatctgtataataagatgcaaacattatgtagtaaagatgctagtgtaccaatatgtgaatcatttttgcatcatttacgcgcacacaatacagaagatagcaaagagatgatcgattatattctaagacaacagtctgcggactttaaacagaaatatatgagatgtagttatcccactagagataagttagaagagtcattaaaatatgcggaacctcgagaatgttgggatccagagtgttcgaatgccaatgttaatttcttactaacacgtaattataataatttaggactttgcaatattgtacgatgtaatactagcgtgaacaacttacagatggataaaacttcctcattaagattgtcatgtggattaagcaatagtgatagattttctactgttcccgtcaatagagcaaaagtagttcaacataatattaaacattcgttcgacctaaaattgcatttgatcagtttattatctctcttggtaatatggatactaattgtagctatttaaatgggtgccgcggcaagcatacagacgacggtgaatacactcagcgaacgtatctcgtctaaattagaacaagaagcgaacgctagtgctcaaacaaaatgtgatatagaaatcggaaatttttatatccgacaaaaccatggatgtaacctcactgttaaaaatatgtgctctgcggacgcggatgctcagttggatgctgtgttatcagccgctacagaaacatatagtggattaacaccggaacaaaaagcatacgtgccagctatgtttactgctgcgttaaacattcagacaagtgtaaacactgttgttagagattttgaaaattatgtgaaacagacttgtaattctagcgcggtcgtcgataacaaattaaagatacaaaacgtaatcatagatgaatgttacggagccccaggatctccaacaaatttggaatttattaatacaggatctagcaaaggaaattgtgccattaaagcgttgatgcaattgacgactaaggccactactcaaatagcacctagacaagttgctggtacaggagttcagttttatatgattgttatcggtgttataatattggcagcgttgtttatgtactatgccaagcgtatgctgttcacatccaccaatgataaaatcaaacttattttagccaataaggaaaacgtccattggactacttacatggacacattctttagaacttctccgatggttattgctaccacggatatacaaaactgaaaatatattgataatattttaatagattaacatggaagttatcgctgatcgtctagacgatatagtgaaacaaaatatagcggatgaaaaatttgtagattttgttatacacggtctagagcatcaatgtcctgctatacttcgaccattaattaggttgtttattgatatactattatttgttatagtaatttatatttttacggtacgtctagtaagtagaaattatcaaatgttgttggtggcgctagtcatcacattaactattttttattactttatactataatagtactagactgacttctaacaaacatctcacctgccataaataaatgcttgatattaaagtcttctatttctaacactattccatctgtggaaaataatactctgacattatcgctaattgacacatcggtgagtgatatgcctataaagtaataatcttctttgggcacatataccagtgtaccaggttctaacaacctatttactggtgctcctgtagcatactttttctttaccttgagaatatccatcgtttgcttggtcaatagcgatatgtgattttttatcaaccactcgaaaaagtaattggagtgttcatatcctctacgggctattgtctcatggccgtgtatgaaatttaagtaacacgactgtggtagatttgttctatagagccggttgccgcaaatagatagaactaccaatatgtctgtacaaatgttaaacattaattgattaacagaaaaaacaatgttcgttctgggaatagaaaccagatcaaaacaaaattcgttagaatatatgccacgtttatacattgaatataaaataactacagtttgaaaaataacagtatcatttaaacatttaacttgcggggttaatctcacaactttactgtttttaaactgttcaaaatatagcatcgatccatgagaaatacgtttagccgcctttaatagaggaaatcccaccgcctttctggatctcaccaacgacgatagttctgaccagcaactcatttcttcatcatccacctgttttaacatataataggcaggagatagatatccgtcattgcaatattccttctcgtaggcacacaatctaatattgataaaatctccattctcttctctgcatttattatcttgtttcggtggctgattaggctgtagtcttggtttaggctttggtatatcgttgttgaatctattttggtcattaaatctttcatttcttcctggtatatttttatcacctcgtttggttggatttttgtctatattatcgtttgtaacatcggtacgggtattcatttatcacaaaaaaaacttctctaaatgagtctactgctagaaaacctcatcgaagaagataccatattttttgcaggaagtatatctgagtatgatgatttacaaatggttattgccggcgcaaaatccaaatttccaagatctatgctttctatttttaatatagtacctagaacgatgtcaaaatatgagttggagttgattcataacgaaaatatcacaggagcaatgtttaccacaatgtataatataagaaacaatttgggtctaggagatgataaactaactattgaagccattgaaaactatttcttggatcctaacaatgaagttatgcctcttattattaataatacggatatgactgccgtcattcctaaaaaaagtggtaggagaaagaataagaacatggttattttccgtcaaggatcatcacctatcttgtgtattttcgaaactcgtaaaaagattaatatttataaagaaaatatggaatccgcatcgactgagtatacacctatcggagacaacaaggctttgatatctaaatatgcgggaattaatatcctaaatgtgtattctccttccacatccataagattgaatgccatttacggattcaccaataaaaataaactagagaaacttagtactaataaggaactagaatcgtatagttctagccctcttcaagaacccattaggttaaatgattttctgggactattggaatgtgttaaaaagaatattcctctaacagatattccgacaaaggattgattactataaatggagaatgttcctaatgtatactttaatcctgtgtttatagagcccacgtttaaacattctttattaagtgtttataaacacagattaatagttttatttgaagtattcgttgtattcattctaatatatgtattttttagatctgaattaaatatgttcttcatgcctaaacgaaaaatacccgatcctattgatagattacgacgtgctaatctagcgtgtgaagacgataaattaatgatctatggattaccatggatgacaactcaaacatctgcgttatcaataaatagtaaaccgatagtgtataaagattgtgcaaagcttttgcgatcaataaatggatcacaaccagtatctcttaacgatgttcttcgcagatgatgattcattttttaagtatttggctagtcaagatgatgaatcttcattatctgatatattgcaaatcactcaatatctagactttctgttattattattgatccaatcaaaaaataaattagaagccgtgggtcattgttatgaatctctttcagaggaatacagacaattgacaaaattcacagactttcaagattttaaaaaactgtttaacaaggtccctattgttacagatggaagggtcaaacttaataaaggatatttgttcgactttgtgattagtttgatgcgattcaaaaaagaatcctctctagctaccaccgcaatagatcctattagatacatagatcctcgtcgcgatatcgcattttctaacgtgatggatatattaaagtcgaataaagtgaacaataattaattctttattgtcatcatgaacggcggacatattcagttgataatcggccccatgttttcaggtaaaagtacagaattaattagacgagttggtaccaaaaattgaaaataaatacaaaggttcttgagggttgtgttaaattgaaagcgagaaataatcataaatactgcagaccatggaaaccgacacacttttgctctgggtactcctgttgtgggtgccaggttcaacaggggatgaagtgcaactggtcgagagtggaggaggcctcgtgcaaccggggggatcacttcggctgagctgcgcagcatctggctttaccatctccgattactggatacactgggttagacaagcaccaggtaaagggctggagtgggtggcaggcatcacgccggcaggagggtacacctattacgctgattctgtgaaaggccgatttactataagtgcagacacgtctaagaatacggcttatctgcaaatgaattcccttagggcagaggatacagctgtttattactgtgctcggtttgtgttcttcctcccgtacgcaatggactactggggtcaagggaccctggttacagttagtagtgggggaggaggttccggaggtgggggaagtggtggcggtggatctgatatccaaatgactcagagcccaagctcactttcagcatctgtaggagatcgcgtgacaataacgtgtcgcgcgtctcaggatgtgtccacggcagtcgcatggtaccaacaaaagccggggaaagctcccaagttgctcatctattctgcctcttttctttatagtggggtaccgagcagattctccggtagtggctccggtaccgactttacgctcacaataagttcactccagcccgaggatttcgcgacctactattgtcaacaggggtatggcaacccattcactttcggacagggaactaaagtcgaaattaaacgcggtggtggaggatcagggggcggcggatctgggggaggggggagccaagttcaattggtcgaaagtggagccgaagtgaaaaagcccggggcgtcagtcaaggtaagttgtaaggcttctggttacactttcacgggttattatatgcattgggtgcgccaagccccggggcagggattggaatggatggggtggataaaccctaatagcggcggaacaaactacgcccagaagttccagggaagagtaaccatgacgagagataccagtatctcaacggcatatatggagctttctcgccttaggagtgacgatacagcagtctactattgtgctcgctctcccaatccatattattatgattcctctggctattactacccaggggcctttgatatatggggacagggaacaatggttaccgttagtagcggcggtggtggatctggcgggggaggctcaggtggaggtggttcacaacccggccttacgcagcccccaagcgtgagcgtcgccccaggccaaacagctaggataacgtgcggtggcaataacatcggaagtaaaagtgtccactggtatcagcagaaaccgggtcaggccccggtcctcgttgtctatgacgactctgaccggccctcaggaatcccggagcggttttcagggtctaactcaggtaacaccgcaactttgactatttcacgcgtcgaagcaggtgatgaagccgattactattgtcaggtgtgggacagcagctccgaccactacgtctttggtactggcactaaggtcacggtcctgggacaatgattaattaatttttataaaaattgaaattttattttttttttttggaatataaatactcgagaccatgttcataaacataaaatccattctttggatgtgttccacactgattgtgactcatgcgctccataaggtcaaggtggggaaaagtccgccggttagagggagtctttccggaaaagtgtctcttccatgccattttagcaccatgcctactttgccgccgtcctacaatacatccgaattccttcgcataaaatggtcaaaaatcgaggtcgataaaaatggaaaggatctgaaagagacgactgtcttggtcgcccaaaacggaaatataaaaatcggacaagattacaaaggccgcgtgtcagttccgacgcatcccgaggctgtaggagatgcgagcttgactgtcgtaaaattgctcgctagcgatgctggactttaccgatgtgacgtgatgtacggtatcgaagatactcaagacactgtatctctcacagtagatggggtcgtcttccactatagggcggcaacctcccggtatactctcaattttgaggcggcgcagaaggcatgtctcgacgtcggggctgttatcgccacaccggaacagctctttgccgcttatgaggatggtttcgagcaatgtgacgccggttggctcgccgatcagacggttcgatatcccattcgggcgccgagggtgggctgttatggagataagatgggcaaagcaggtgtcaggacatatggattccgcagcccacaggaaacgtatgatgtgtactgctacgttgatcatctggacggagatgtctttcacctgacggtgccctccaaattcacttttgaggaggccgctaaagaatgtgagaatcaggatgcacgactcgcgaccgtaggtgagctgcaagcggcgtggaggaatgggttcgatcagtgtgactacgggtggctgtcagacgcctctgtcaggcaccctgtaactgtcgcaagagcgcaatgcggcggggggctcctgggagtacgaacgctctacaggtttgaaaaccagactggttttcctccaccagattcacgctttgatgcatattgcttcaagcgacggatgtcagacctgagtgtgattggacatcccatagattcagagtctaaggaagacgagccctgctccgaagaaacggacccagtccacgatctgatggctgaaatcctccccgagttccctgatattatagaaatagatctttatcactctgaggaaaatgaagaggaagaagaggagtgcgcaaacgccacggatgttacaacgacccccagtgtccagtatatcaatggaaagcaccttgttacgacagttcctaaggacccagaagctgctgaatgattaattaatttttatgagctcggaggtaatgatatgtatcaatcggtgtgtagaaagtgttacatcgactcataatattatattttttatctaaaaaactaaaaataaacattgattaaattttaatataatacttaaaaatggatgttgtgtcgttagataaaccgtttatgtattttgaggaaattgataatgagttagattacgaaccagaaagtgcaaatgaggtcgcaaaaaaactaccgtatcaaggacagttaaaactattactaggagaattattttttcttagtaagttacagcgacacggtatattagatggtgccaccgtagtgtatataggatcggctcctggtacacatatacgttatttgagagatcatttctataatttaggagtgatcatcaaatggatgctaattgacggccgccatcatgatcctattttaaatggattgcgtgatgtgactctagtgactcggttcgttgatgaggaatatctacgatccatcaaaaaacaactgcatccttctaagattattttaatttctgatgtaagatccaaacgaggaggaaatgaacctagtacggcggatttactaagtaattacgctctacaaaatgtcatgattagtattttaaaccccgtggcatctagtcttaaatggagatgcccgtttccagatcaatggatcaaggacttttatatcccacacggtaataaaatgttacaaccttttgctccttcatattcagctgaaatgagattattaagtatttataccggtgagaacatgagactgactcgagttaccaaattagacgctgtaaattatgaaaaaaagatgtactaccttaataagatcgtccgtaacaaagtagttgttaactttgattatcctaatcaggaatatgactattttcacatgtactttatgctgaggaccgtgtactgcaataaaacatttcctactactaaagcaaaggtactatttctacaacaatctatatttcgtttcttaaatattccaacaacatcaactgaaaaagttagtcatgaaccaatacaacgtaaaatatctagcaaaaattctatgtctaaaaacagaaatagcaagagatccgtacgcggtaataaatagaaacgtgctactgagatatactaccgatatagagtataatgatttagttactttaataaccgttagacataaaattgattctatgaaaactgtgtttcaggtatttaacgaatcatccataaattatactccggttgatgatgattatggagaaccaatcattataacatcgtatcttcaaaaaggtcataacaagtttcctgtaaattttctatacatagatgtggtaatatctgacttatttcctagctttgttagactagatactacagaaactaatatagttaatagtgtactacaaacaggcgatggtaaaaagactcttcgtcttcccaaaatgttagagacggaaatagttgtcaagattctctatcgccctaatataccattaaaaattgttagatttttccgcaataacatggtaactggagtagagatagccgatagatctgttatttcagtcgctgattaatcaattagtagagatgagataagaacattataataatcaataatattatcttatatctcgtttagaaaaatgctaatattaaaatagctaacgctagtaatccaatcggaagccatttgatatctataatagggtatctaatttcctgattcagatagcggacagctatattctcggtagctactcgtttggaatcacaaacattatttacatctaatttactatctgtaatggaaacgtttcccaatgaaatggtacaatccgatacattgcattttgttatatttttttttaaagaggctggtaacaacgcatcgcttcgtttacatggctcgtaccaacaataatagggtaatcttgtatctattcctatccgtactatgcttttatcaggataaatacatttacatcgtatatcgtctttgttagcatcacagaatgcataaatttgttcgtccgtcatgataaaaatttaaagtgtaaatataactattatttttatagttgtaataaaaagggaaatttgattgtatactttcggttctttaaaagaaactgacttgataaaaatggctgtaatctctaaggttacgtatagtctatatgatcaaaaagagattaatgctacagatattatcattagtcatgttaaaaatgacgacgatatcggtaccgttaaagatggtagactaggtgctatggatggggcattatgtaaaacttgtgggaaaacggaattggaatgtttcggtcactggggtaaagtaagtatttataaaactcatatagttaagcctgaatttatttcagaaattattcgtttactgaatcatatatgtattcactgcggattattgcgttcacgagaaccgtattccgacgatattaacctaaaagagttatcgggacacgctcttaggagattaaaggataaaatattatccaagaaaaagtcatgttggaacagcgaatgtatgcaaccgtatcaaaaaattactttttcaaagaaaaaggtttgtttcgtcaacaagttggatgatattaacgttcctaattctctcatctatcaaaagttaatttctattcatgaaaagttttggccattattagaaattcatcaatatccagctaacttattttatacagactactttcccatccctccgctgattattagaccggctattagtttttggatagatagtatacccaaagagaccaatgaattaacttacttattaggtatgatcgttaagaattgtaacttgaatgctgatgaacaggttatccagaaggcggtaatagaatacgatgatattaaaattatttctaataacactaccagtatcaatttatcatatattacatccggcaaaaataatatgattagaagttatatcgtcgcccgacgaaaagatcagaccgctagatctgtaattggtcccagtacatctatcaccgttaatgaggtaggaatgcccgcatatattagaaatacacttacagaaaagatatttgttaatgcctttacagtggataaagttaaacaactattagcgtcaaaccaagttaaattttactttaataaacgattaaaccaattaacaagaatacgccaaggaaagtttatcaaaaataaaatacatttattgcctggtgattgggtagaagtagctgttcaagaatatacaagtattatttttggaagacagccgtctctacatagatacaacgtcatcgcttcatctatcagagctaccgaaggagatactatcaaaatatctcccggaattgccaactctcaaaatgctgatttcgacggagatgaagaatggatgatattggagcaaaatcctaaagccgtaattgaacaaagtattcttatgtatccgacgacgttactcaaacacgatattcatggagcccccgtttatggatctattcaagatgaaatcgtagcagcgtattcattgtttaggatacaagatctttgtttagatgaagtattgaacatcttggggaaatatggaagagagttcgatcctaaaggtaaatgtaaattcagcggtaaagatatctatacttacttgataggtgaaaagattaattatccgggtctcttaaaggatggtgaaattattgcaaacgacgtagatagtaattttgttgtggctatgaggcatctgtcattggctggactcttatccgatcataagtcgaacgtggaaggtatcaactttattatcaagtcatcttatgtttttaagagatatctatctatttacggttttggggtgacattcaaagatctgagaccaaattcgacgttcactaataaattggaggccatcaacgtagaaaaaatagaacttatcaaagaagcatacgccaaatatctcaacgatgtaagagacgggaaaatagttccattatctaaagctttagaggcggactatgtggaatccatgttatccaacttgacaaatcttaatatccgagagatagaagaacatatgagacaaacgctgatagatgatccagataataacctcctgaaaatggccaaagcgggttataaagtaaatcctacagaactaatgtatattctaggtacgtatggacaacaaaggattgatggtgaaccagcagagactcgagtattgggtagagtcttaccttactatcttccagactctaaggatccagaaggaagaggttacattcttaattctttaacaaaaggattaacgggttctcaatattacttttcgatgctggttgccagatctcaatctactgatatcgtctgtgaaacatcacgtaccggaacactggctagaaaaatcattaaaaagatggaggatatggtggtcgacggatacggacaagtagttataggtaatacgctcatcaagtacgccgccaattataccaaaattctaggctcagtatgtaaacctgtagatcttatctatccagatgagtccatgacttggtatttggaaattagtgctctgtggaataaaataaaacagggattcgtttactctcagaaacagaaacttgcaaagaagacattggcgccgtttaatttcctagtattcgtcaaacccaccactgaggataatgctattaaggttaaggatctgtacgatatgattcataacgtcattgatgatgtgagagagaaatacttctttacggtatctaatatagattttatggagtatatattcttgacgcatcttaatccttctagaattagaattacaaaagaaacggctatcactatctttgaaaagttctatgaaaaactcaattatactctaggtggtggaactcctattggaattatttctgcacaggtattgtctgagaagtttacacaacaagccctgtccagttttcacactactgaaaaaagtggtgccgtcaaacaaaaacttggtttcaacgagtttaataacttgactaatttgagtaagaataagaccgaaattatcactctggtatccgatgatatctctaaacttcaatctgttaagattaatttcgaatttgtatgtttgggagaattaaatccagacatcactcttcgaaaagaaacagataaatatgtagtagatataatagttaatagattatacatcaagagagcagaaataaccgaattagttgtcgaatatatgattgaacgatttatctcctttagcgtcattgtaaaggaatggggtatggagacattcattgaggacgaggataatattagatttactgtctacctaaatttcgttgaaccggaagaattgaatcttagtaagtttatgatggttcttccgggtgccgccaacaagggcaagattagtaaattcaagattcctatctctgattatacgggttatgacgacttcaatcaaacaaaaaagctcaataagatgactgtagaactcatgaatctaaaagaattgggttctttcgatttggaaaacgtcaacgtgtatcctggagtatggaatacatacgatatcttcggtatcgaggccgctcgtgaatacttgtgcgaagccatgttaaacacctatggagaagggttcgattatctgtatcagccttgtgatcttctcgctagtttactatgtgctagttacgaaccagaatcagttaataaattcaagttcggtgcagctagtactcttaagagagctacgttcggagacaataaagcattgttaaacgcggctcttcataaaaagtcagaacctattaacgataatagtagctgccacttttttagcaaggtccctaatataggaactggatattacaaatactttatcgacttgggtcttctcatgagaatggaaaggaaactatctgataagatatcttctcaaaagatcaaggaaatggaagaaacagaagacttttaattcttatcaataacatatttttctatgatctgtcttttaaacgatggattttccacaaatgcgcctctcaagtccctcatagaatgatacacgtataaaaaatatagcataggcaatgactccttatttttagacattagatatgccaaaatcatagccccgcttctatttactcccgcagcacaatgaaccaacacgggctcgtttcgttgatcacatttagataaaaaggcggttacgtcgtcaaaatatttactaatatcggtagttgtatcatctaccaacggtatatgaataatattaatattagagttaggtaatgtatatttatccatcgtcaaatttaaaacatatttgaacttaacttcagatgatggtgcatccatagcatttttataatttcccaaatacacattattggttacccttgtcattatagtgggagatttggctttgtgcatatctccagttgaacgtagtagtaagtatttatacaaacttttcttatccatttataacgtacaaatggataaaactactttatcggtaaacgcgtgtaatttagaatacgttagagaaaaggctatagtaggcgtacaagcagccaaaacatcaacacttatattctttgttattatattggcaattagtgcgctattactctggtttcagacgtctgataatccagtctttaatgaattaacgagatatatgcgaattaaaaatacggttaacgattggaaatcattaacggatagcaaaacaaaattagaaagtgatagaggtagacttctagccgctggtaaggatgatatattcgacttcaaatgtgtggatttcggcgcctattttatagctatgcgattggataagaaaacatatctgccgcaagctattaggcgaggtactggagacgcgtggatggttaaaaaggcggcaaaggtcgatccatctgctcaacaattttgtcagtatttgataaaacacaagtctaataatgttattacttgtggtaatgagatgttaaatgaattaggttatagcggttattttatgtcaccgcattggtgttccgattttagtaatatggaatagtgttagataaatgcggtaacgaatgttcctgtaaggaaccataacagtttagatttaacgttaaagatgagcataaacataataaacaaaattacaatcaaacctataacattaatatcaaacaatccaaaaaatgaaatcagtggagtagtaaacgcgtacataactcctggataacgtttagcagctgccgttcctattctagaccaaaaattcggtttcatgttttcgaagcggtgttctgcaacaagtcggggatcgtgttctacatatttggcggcgttatccagtatctgcctattgatcttcatttcgttttcgattctggctatttcaaaataaaatcccgatgatagacctccagactttataatttcatctacgatgttcagcgccgtagtaactctaataatataggctgataagctaacatcataccctcctgtatatgtgaatatggcatgatttttgtccattacaagctcggttttaactttattgcctgtaataatttctctcatctgtaggatatctatttttttgtcatgcattgccttcaagacgggacgaagaaacgtaatatcctcaataacgttatcgttttctacaataactacatattctacctttttattttctaactcggtaaaaaaattagaatcccatagggctaaatgtctagcgatatttcttttcgtttcctctgtacacatagtgttacaaaaccctgaaaagaagtgagtatacttgtcatcatttctaatgtttcctccagtccactgtataaacgcataatccttgtaatgatctggatcatccttgactaccacaacatttcttttttctggcataacttcgttgtcctttacatcatcgaacttctgatcattaatatgctcatgaacattaggaaatgtttctgatggaggtctatcaataactggcacaacaataacaggagttttcaccgccgccatttagttattgaaattaatcatatacaactctttaatacgagttatattttcgtctatccattgtttcacatttacatatttcgacaaaaagatataaaatgcgtattccaatgcttctctgtttaatgaattactaaaatatacaaacacgtcactgtctggcaataaatgatatcttagaatattgtaacaatttattttgtattgcacatgttcgtgatctatgagttcttcttcgaatggcataggatctccgaatctgaaaacgtataaataggagttagaataataatatttgagagtattggtaatatataaactctttagcggtataattagtttttttctctcaatttctatttttagatgtgatggaaaaatgactaattttgtagcattagtatcatgaactctaatcaaaatcttaatatcttcgtcacacgttagctctttgaagtttttaagagatgcatcagttggttctacagatggagtaggtgcaacaattttttgttctacacatgtatgtactggagccattgttttaactataatggtgcttgtatcgaaaaactttaatgcagatagcggaagctcttcgccgcgactttctacatcgtaattgggttctaacgccgatctctgaatggatactagttttctaagttctaatgtgattctctgaaaatgtaaatccaattcctccggcattatagatgtgtatacatcggtaaataaaactatagtatccaacgatcccttctcgcaaattctagtcttaaccaaaaaatcgtatataaccacggagatggcgtatttaagagtggattcttctaccgttttgttcttggatgtcatataggaaactataaagtccgcactactgttaagaatgattactaacgcaactatatagttcaaattaagcattttggaaacataaaataactctgtagacgatacttgactttcgaataagtttgcagacaaacgaagaaagaacagacctctcttaatttcagaagaaaactttttttcgtattcctgacgtctagagtttatatcaataagaaagttaagaattagtcggttaatgttgtatttcattacccaagtttgagatttcataatattatcaaaagacatgataatattaaagataaagcgctgactatgaacgaaatagctatatggttcgctcaagaatatagtcttgttaaacgtggaaacgataactgtatttttaatcacgtcagcggcatctaaattaaatataggtatatttattccacacactctacaatatgccacaccatcttcataataaataaattcgttagcaaaattattaattttagtgaaatagttagcgtcaactttcatagcttccttcaatctaatttgatgctcacacggtgcgaattccactctaacatcccttttccatgcctcaggttcatcgatctctataatatctagtttcttgcgtttcacaaacacgggctcgtctctcgcgatgagatctgtatagtaactatgtaaatgataactagatagaaagatgtagctatatagatgacgatcctttaagagaggtataataactttaccccaatcagataaactattgttatggtcttcggaaaaagaatttttataaatttttccagtattttccaaatatacgtacttgacatctaaaaaatccttaatgataataggaatggataatccgtctattttataaagaaatacatatcgcacattatacttttttttggaaatgggaataccgatgtgtctacataaatatgcaaagtctaaatattttttagagaatcttagttggtccaaattcttttccaagtacggtaatagatttttcatattgaacggtatcttcttaatctctggttctagttccgcattaaatgatgaaactaagtcactatttttataactaacgattacatcacctctaacatcatcatttaccagaatactgatcttcttttgtcgtaaatacatgtctaatgtgttaaaaaaaagatcatacaagttatacgtcatttcatctgtggtattcttgtcattgaaggataaactcgtactaatctcttctttaacagcctgttcaaatttatatcctatatacgaaaaaatagcaaccagtgtttgatcatccgcgtcaatattctgttctatcgtagtgtataacaatcgtatatcttcttctgtgatagtcgatacgttataaaggttgataacgaaaatatttttatttcgtgaaataaagtcatcgtaggattttggacttatattcgcgtctagtagatatgcttttatttttggaatgatctcaattagaatagtctctttagagtccatttaaagttacaaacaactaggaaattggtttatgatgtataatttttttagtttttatagattctttattctatacttaaaaaatgaaaataaatacaaaggttcttgagggttgtgttaaattgaaagcgagaaataatcataaattatttcattatcgcgatatccgttaagtttgtatcgtaatggcgtggtcaattacaaataaagcggatactagtagcttcacaaagatggctgaaatcagagctcatctaaaaaatagcgctgaaaataaagataaaaacgaggatattttcccggaagatgtaataattccatctactaagcccaaaaccaaacgagccactactcctcgtaaaccagcggctactaaaagatcaaccaaaaaggaggaagtggaagaagaagtagttatagaggaatatcatcaaacaactgaaaaaaattctccatctcctggagtcagcgacattgtagaaagcgtggccgctgtagagctcgatgatagcgacggggatgatgaacctatggtacaagttgaagctggtaaagtaaatcatagtgctagaagcgatctttctgacctaaaggtggctaccgacaatatcgttaaagatcttaagaaaattattactagaatctctgcagtatcgacggttctagaggatgttcaagcagctggtatctctagacaatttacttctatgactaaagctattacaacactatctgatctagtcaccgagggaaaatctaaagttgttcgtaaaaaagttaaaacttgtaagaagtaaatgcgtgcacttttttataaagatggtaaactctttaccgataataattttttaaatcctgtatcagacgataatccagcgtatgaggttttgcaacatgttaaaattcctactcatttaacagatgtagtagtatatgaacaaacgtgggaggaggcgttaactagattaatttttgtgggaagcgattcaaaaggacgtagacaatacttttacggaaaaatgcatgtacagaatcgcaacgctaaaagagatcgtatttttgttagagtatataacgttatgaaacgaattaattgttttataaacaaaaatataaagaaatcgtccacagattccaattatcagttggcggtttttatgttaatggaaactatgttttttattagatttggtaaaatgaaatatcttaaggagaatgaaacagtagggttattaacactaaaaaataaacacatagaaataagtcccgatgaaatagttatcaagtttgtaggaaaggacaaagtttcacatgaatttgttgttcataagtctaatagactatataagccgctattgaaactgacggatgattctagtcccgaagaatttctgttcaacaaactaagtgaacgaaaggtatacgaatgtatcaaacagtttggtattagaatcaaggatctccgaacgtatggagtcaattatacgtttttatataatttttggacaaatgtaaagtccatatctcctcttccatcaccaaaaaagttaatagcgttaactatcaaacaaactgctgaagtggtaggtcatactccatcaatttcaaaaagagcttacatggcaacgactattttagaaatggtaaaggataaaaattttttagatgtagtatctaaaactacgttcgatgaattcctatctatagtcgtagatcacgttaaatcatctacggatggatgatatagatctttacacaaataattacaagaccgataaatggaaatggataagcgtatgaaatctctcgcaatgacagctttcttcggagagctaaacacattagatattatggcattgataatgtctatatttaaacgccatccaaacaataccattttttcagtggataaggatggtcagtttatgattgatttcgaatacgataattataaggcttctcaatatttggatctgaccctcactccgatatctggagatgaatgcaagactcacgcatcgagtatagccgaacaattggcgtgtgtggatattattaaagaggatattagcgaatatatcaaaactactccccgtcttaaacgatttataaaaaaataccgcaatagatcagatactcgtatcagtcgagatacagaaaagcttaaaatagctctagctaaaggcatagattacgaatatataaaagacgcttgttaataagtaaatgaaaaaaaactagtcgtttataataaaacacaatatggatgccaacatagtatcatcttctactattgcaacgtatatagacgctttagcaaagaatgcttcagaattagaacagaggtctaccgcatacgaaataaataatgaattggaactagtatttattaagccgccattaattactttgacaaatgtagtgaatatctctacgattcaggaatcgtttattcgatttaccgttactaataaggaaggtgtcaaaattagaactaagattccattatctaaggtacatggtctagatgtaaaaaatgtacagttagtagatgctatagataacatagtttgggaaaagaaatcattagtgacggaaaatcgtcttcacaaagaatgcttgttgagactatcgacagaggaacgtcatatatttttggattacaagaaatatggatcctctatccgactagaattagtcaatcttattcaagcaaaaacaaaaaactttacgatagactttaagctaaaatattttctaggatccggtgcccaatctaaaagttctttgttgcacgctattaatcatccaaagtcaaggcctaatacatctctggaaatagaattcacacctagagacaatgaaaaagttccatatgatgaactaataaaggaattgacgactctatcacgtcatatatttatggcttctccagagaatgtaattctttctccgcctattaacgcacctataaagacttttatgttgcctaaacaagatatagtaggtctggatctggaaaatctatatgccgtaactaagactgacggcattcctataactatcagagttacatcaaacgggttgtattgttattttacacatcttgggtatattattagatatccagttaagagaataatagattccgaagtagtagtctttggtgaggcagttaaggataagaactggaccgtatatctcattaagctaatagagcctgtgaatgcaatcaatgatagactagaagaaagtaagtatgttgaatctaaactagtggatatttgtgatcggatagtattcaagtcaaagaaatatgaaggtccgtttactacaactagtgaagtcgtcgatatgttatctacatatttaccaaagcaaccagaaggtgttattctgttctattcaaagggacctaaatctaacattgattttaaaattaaaaaggaaaatactatagaccaaactgcaaatgtagtatttaggtacatgtccagtgaaccaattatctttggagaatcgtctatctttgtagagtataagaaatttagcaacgataaaggctttcctaaagaatatggttctggtaagattgtgttatataacggcgttaattatctaaataatatctattgtttggaatatattaatacacataatgaagtgggtattaagtccgtggttgtacctattaagtttatagcagaattcttagttaatggagaaatacttaaacctagaatcgataaaaccatgaaatatattaactcagaagattattatggaaatcaacataatatcatagtcgaacatttaagagatcaaagcatcaaaataggagatatctttaacgaggataaactatcggatgtgggacatcaatacgccaataatgataaatttagattaaatccagaagttagttattttacgaataaacgaactagaggaccgttgggaattttatcaaactacgtcaagactcttcttatttctatgtattgttccaaaacatttttagacgattccaacaaacgaaaggtattggcgattgattttggaaacggtgctgacctggaaaaatacttttatggagagattgcgttattggtagcgacggatccggatgctgatgctatagctagaggaaatgaaagatacaacaaattaaactctggaattaaaaccaagtactacaaatttgactacattcaggaaactattcgatccgatacatttgtctctagtgtcagagaagtattctattttggaaagtttaatatcatcgactggcagtttgctatccattattcttttcatccgagacattatgctaccgtcatgaataacttatccgaactaactgcttctggaggcaaggtattaatcactaccatggacggagacaaattatcaaaattaacagataaaaagacttttataattcataagaatttacctagtagcgaaaactatatgtctgtagaaaaaatagctgatgatagaatagtggtatataatccatcaacaatgtctactccaatgactgaatacattatcaaaaagaacgatatagtcagagtgtttaacgaatacggatttgttcttgtagataacgttgatttcgctacaattatagaacgaagtaaaaagtttattaatggcgcatctacaatggaagatagaccgtctacaaaaaactttttcgaactaaatagaggagccattaaatgtgaaggtttagatgtcgaagacttacttagttactatgttgtttatgtcttttctaagcggtaaataataatatggtatgggttctgatatccccgttctaaatgcattaaataattccaatagagcgatttttgttcctataggaccttccaactgtggatactctgtattgttaatagatatattaatacttttgtcgggtaacagaggttctacgtcttctaaaaataaaagtttgataacatctggcctgttcataaataaaaacttggcgattctatatatactcttattatcaaatctagccattgtcttatagatgtgagctactgtaggtgtaccatttgattttctttctaatactatatatttctctcgaagaagttcttgcacatcatctgggaataaaatactactgttgagtaaatcagttattttttttatatcgatattgatggacatttttatagttaaggataataagtatcccaaagtcgataacgacgataacgaagtatttatacttttaggaaatcacaatgactttatcagatcaaaattaacaaaattaaaggagcatgtatttttttctgaatatattgtgactccagatacatatggatctttatgcgtcgaattaaatgggtctagttttcagcacggtggtagatatatagaggtggaggaatttatagatgctggaagacaagttagatggtgttctacatccaatcatatatctgaagatatacccgaagatatacacactgataaatttgtcatttatgatatatacacttttgacgctttcaagaataaacgattggtattcgtacaggtacctccgtcgttaggagatgatagctatttgactaatccgttattgtctccgtattatcgtaattcagtagccagacaaatggtcaatgatatgatttttaatcaagattcatttttaaaatatttattagaacatctgattagaagccactatagagtttctaaacatataacaatagttagatacaaggataccgaagaattaaatctaacgagaatatgttataatagagataagtttaaggcgtttgtattcgcttggtttaacggcgtttcggaaaatgaaaaggtactagatacgtataaaaaggtatctaatttgatataatgaattcagtgactgtatcacacgcgccatatactattacttatcacgatgattgggaaccagtaatgagtcaattggtagagttttataacgaagtagccagttggctgctacgagacgagacgtcgcctattcctgataagttctttatacagttgaaacaaccgcttagaaataaacgagtatgtgtgtgcggtatagatccgtatccgaaagatggaactggtgtaccgttcgaatcaccaaattttacaaaaaaatcaattaaggagatagcttcatctatatctagattaaccggagtaattgattataaaggttataaccttaatataatagacggggttataccctggaattattacttaagttgtaaattaggagaaacaaaaagtcacgcgatctactgggataagatttccaagttactgctgcagcatataactaaacacgttagtgttctttattgtttgggtaaaacagatttctcgaatatacgggcaaagttagaatccccggtaactaccatagtgggatatcatccagcggctagagaccgtcaattcgagaaagatcgatcatttgaaattatcaacgttttactggaattagacaacaaggtacctataaattgggctcaagggtttatttattaatgctttagtgaaattttaacttgtgttctaaatggatgcggctattagaggtaatgatgttatctttgttcttaagactataggtgtcccgtcagcgtgcagacaaaatgaagatccaagatttgtagaagcatttaaatgcgacgagttagaaagatatattgagaataatccagaatgtacactattcgaaagtcttagggatgaggaagcatactctatagtcagaattttcatggatgtagatttagacgcgtgtctagacgaaatagattatttaacggctattcaagattttattatcgaggtgtcaaactgtgtagctagattcgcgtttacagaatgcggcgccattcatgaaaatgtaataaaatccatgagatctaatttttcattgactaagtctacaaatagagataaaacaagttttcatattatctttttagacacgtataccactatggatacattgatagctatgaaacgaacactattagaattaagtagatcatctgaaaatccactaacaagatcgatagacactgccgtatataggagaaaaacaactcttcgggttgtaggtactaggaaaaatccaaattgcgacactattcatgtaatgcaaccacctcatgataatatagaagattacctattcacttacgtggatatgaacaacaatagttattacttttctctacaacgacgattggaggatttagttcctgataagttatgggaaccagggtttatttcattcgaagacgctataaaaagagtttcaaaaatattcattaattctataataaactttaatgatctcgatgaaaataattttacaacggtaccactggtcatagattacgtaacaccttgtgcattatgtaaaaaacgatcgcataaacatccgcatcaactatcgttggaaaatggtgctattagaatttacaaaactggtaatccacatagttgtaaagttaaaattgttccgttggatggtaataaactgtttaatattgcacaaagaattttagacactaactctgttttattaaccgaacgaggagaccatatagtttggattaataattcatggaaatttaacagcgaagaacccttgataacaaaactaattttgtcaataagacatcaactacctaaggaatattcaagcgaattactctgtccaagaaaacgaaagactgtagaagctaacatacgagacatgttagtagattcagtggagaccgatacctatccggataaacttccgtttaaaaatggtgtattggacctggtagacggaatgttttactctggagatgatgctaaaaaatatatgtgtactgtatcaaccggatttaaatttgacgatacaaagttcgtcgaagacagtccagaaatggaagagttaatgaatatcattaacgatatccaaccattaacggatgaaaataagaaaaatagagagctatatgaaaaaacattatctagttgtttatgcggtgctaccaaaggatgtttaacattcttttttggagaaactgcaactggaaagtcgacaaccaaacgtttgttaaagtctgctatcggtgacctgtttgttgagacgggtcaaacaattttaacagatgtattggataaaggacctaatccatttatcgctaacatgcatttgaaaagatctgtattctgtagcgaactacctgattttgcatgtagtgggtcaaagaaaatcagatctgataatattaaaaagttgacagaaccttgtgtcattggaagaccgtgtttctccaataaaattaataatagaaaccatgcgacaatcattatcgatactaattacaaacctgtttttgataggatagataacgcattaatgagaagaattgccgtcgtgcgattcagaacacacttttctcaaccttctggtagagaggctgctgaaaataatgacgcgtacgataaagtcaaactattagacgaggggttagatggtaaaatacaaaataatagatatagattcgcatttctatacttgttggtgaaatggtacagaaaatatcatgttcctattatgaaactatatcctacacccgaagagattcctgactttgcattctatctcaaaataggtactctgttggtatctagctctgtaaagcatattccattaatgacggacctctccaaaaagggatatatattgtacgataatgtggtcactcttccgttgactactttccaacagaaaatatccaagtattttaattctagactatttggacacgatatagagagcttcatcaatagacataagaaatttgccaatgttagtgatgaatatctgcaatatatattcatagaggatatttcatctccgtaaatatatgctcatatatttatagaagatatcacatatctaaatgaataccggaattatagatttatttgataatcatgttgatagtataccaactatattacctcatcagttagctactctagattatctagttagaactatcatagatgagaacagaagcgtgttattgttccatattatgggatcaggtaaaacaataatcgctttgttgttcgccttggtagcttccagatttaaaaaggtttacattctagtgccgaacatcaacatcttaaaaattttcaattataatatgggtgtagctatgaacttgtttaatgacgaattcatagctgagaatatctttattcattccacaacaagtttttattctcttaattataacgataacgtcattaattataacggattatctcgctacaataactctatttttatcgttgatgaggcacataatatctttgggaataatactggagaacttatgaccgtgataaaaaataaaaacaagattccttttctactattgtctggatctcccattactaacacacctaatactctgggtcatattatagatttaatgtccgaagagacgatagattttggtgaaattattagtcgtggtaagaaagtaattcagacacttcttaacgaacgcggtgtgaatgtacttaaggatttgcttaaaggaagaatatcatattacgaaatgcctgataaagatctaccaacgataagatatcacggacgtaagtttctagatactagagtagtatattgtcacatgtctaaacttcaagagagagattatatgattactagacgacagctatgttatcatgaaatgtttgataaaaatatgtataacgtgtcaatggcagtattgggacaacttaatctgatgaataatttagatactttatttcaggaacaggataaggaattgtacccaaatctgaaaataaataatggcgtgttatacggagaagaattggtaacgttaaacattagttccaaatttaaatactttattaatcggatacagacactcaacggaaaacattttatatacttttctaattctacatatggcggattggtaattaaatatatcatgctcagtaatggatattctgaatataatggttctcagggaactaatccacatatgataaacggcaaaccaaaaacatttgctatcgttactagtaaaatgaaatcgtctttagaggatctattagatgtgtataattctcctgaaaacgatgatggtagtcaattgatgtttttgttttcatcaaacattatgtccgaatcctatactctaaaagaggtaaggcatatttggtttatgactatcccagatactttttctcaatacaaccaaattcttggacgatctattagaaaattctcttacgccgatatttctgaaccagttaatgtatatcttttagccgccgtatattccgatttcaatgacgaagtgacgtcattaaacgattacacacaggatgaattaattaatgttttaccatttgacatcaaaaagctgttatatctaaaatttaagacgaaagaaacgaatagaatatactctattcttcaagagatgtctgaaacgtattctcttccaccacatccatcaattgtaaaagttttattgggagaattggtcagacaatttttttataataattctcgtattaagtataacgataccaagttacttaaaatggttacatcagttataaaaaataaagaagacgctaggaattacatagatgatattgtaaacggtcacttctttgtatcgaataaagtatttgataaatctcttttatacaaatacgaaaacgatattattacagtaccgtttagactttcctacgaaccatttgtttggggagttaactttcgtaaagaatataacgtggtatcttctccataaaactgatgagatatataaagaaataaatgtcgagctttgttaccaatggataccttccagttacattggagccacacgagctgacgttagacataaaaactaatattaggaatgccgtatataagacgtatctccatagagaaattagtggtaaaatggccaagaaaatagaaattcgtgaagacgtggaattacctctcggcgaaatagttaataattctgtagttataaacgttccgtgtgtaataacctacgcgtattatcacgttggggatatagttagaggaacattaaacatcgaagatgaatcaaatgtaactattcaatgtggagatttaatctgtaaactaagtagagattcgggtactgtatcatttagcgattcaaagtactgcttttttcgaaatggtaatgcgtatgacaatggcagcgaagtcactgccgttctaatggaggctcaacaaggtatcgaatctagttttgtttttctcgcgaatatcgtcgactcataagaaagagaatagcggtaagtataaacacgaatactatggcaataattgcgaatgttttattcccttcgatatatttttgataatatgaaaaacatgtctctctcaaatcggacaaccatctcataaaatagttatctcgcgctggcgaggtggttgccgctcgtataatctccccagaataatatacttgcgtgtcgtcgttcaatttatacggatttctatagttctctgttatataatgcggttttccatcatgattagacgacgacaatagtgttctaaatttagatagttgatcagaatgaatgtttattggcgttggaaaaattatccatgctgcgtctgcagagtggttgatagttgttcctagatatgtaaaataatccaacgtactaggtagcaaattgtctagataaaatactgaatcaaacggcgcagacgtattagcggatctaatggaatccaattgattgactatcttttgaaaatatacatttttatgatccgatacttgtaagaatatagaaataatgataagtccatcatcgtgtttttttgcctcttcataagaactatattttttcttattccaatgaacaagattaatctctccagagtatttgtacacatctatcaagtgattggatccataatcgtcttcctttccccaatatatatgtagtgatgataacacatattcattggggagaaaccctccacttatatatcctcctttaaaattaatccttactagttttccagtgttctggatagtggttggtttcgactcattataatgtatgtctaacggcttcaatcgcgcgttagaaattgcttttttagtttctatattaataggagatagttgttgcggcatagtaaaaatgaaatgataactgtttaaaaatagctcttagtatgggaattacaatggatgaggaagtgatatttgaaactcctagagaattaatatctattaaacgaataaaagatattccaagatcaaaagacacgcatgtgtttgctgcgtgtataacaagtgacggatatccgttaataggagctagaagaacttcattcgcgttccaggcgatattatctcaacaaaattcagattctatctttagagtatccactaaactattacggtttatgtactacaatgaactaagagaaatctttagacggttgagaaaaggttctatcaacaatatcgatcctcactttgaagagttaatattattgggtggtaaactagataaaaaggaatctattaaagattgtttaagaagagaattaaaagaggaaagtgatgaacgtataacagtaaaagaatttggaaatgtaattctaaaacttacaacacgggataaattatttaataaagtatatataggttattgcatggcgtgttttattaatcaatcgttggaggatttatcgcatactagtatttacaatgtagaaattagaaagattaaatcattaaatgattgtattaacgacgataaatacgaatatctgtcttatatttataatatgctagttaatagtaaatgaacttttacagatctagtataattagtcagattattaagtataatagacgactagctaagtctattatttgcaaggatgactctcaaattattacactcacggcattcgttaaccaatgcctatggtgtcataaacgagtatccgtgtccgctattttattaactactgataacaaaatattagtatgtaacagacgagatagttttctctattctgaaataattagaactagaaacatgtttagaaagaaacgattatttctgaattattccaattatttgtccaaacaggaaagaagtatactatcgtcatttttttctctatatccagctactgctgataatgatagaatagacgctatttatccgggtggcatacccaaaaggggtgagaatgttccagagtgtctatccagggaaatcaaagaagaagttaatatagacaattcttttgtattcatagacactcggttttttattcatggtatcatagaagataccattatcaacaaattttttgaggtaattttctttgtcggaagaatatctctaacgagtgatcaaattattgatacctttaaaagtaatcatgaaatcaaggatctaatatttttagatccgaattcaggtaatggactccaatacgaaattgcaaaatatgctctagatactgcaaaacttaaatgttacggccatagaggatgttattatgaatcattaaaaaaattaactgaggatgattgattagaaaatataaattaatttaccatcgtgtatttttataacgggattgtccggcatatcatgtagatagttaccgtctacatcgtatactcgaccatctacgcctttaaatcctctatttattgacattaatctattagaattggaataccaaatattagtaccctcaattagtttattggtaatattttttttagacgatagatcgatggctcttgaaaccaaggttttccaaccggactcattgtcgatcggtgagaagtctttttcattagcatgaatccattctaatgatgtatgtttaaacactctaaacaattggacaaattcttttgatttgctttgaatgatttcaaataggtcttcgtctacagtaggcataccattagataatctagccattataaagtgcacgtttacatatctacgttctggaggagtaagaacgtgactattgagacgaatggctcttcctactatctgacgaagagacgcctcgttccatgtcatatctaaaatgaagatatcattaattgagaaaaaactaataccctcgcctccactagaagagaatacgcatgttttaatgcattctccgttagtgtttgattcttggttaaactcagccaccgccttgattctagtatcttttgttctagatgagaactctatattagagataccaaagactttgaaatatagtaataagatttctattcctgactgattaacaaatggttcaaagactagacatttaccatgggatgctaatattcccaaacatacatctataaatttgacgcttttctcttttaattcagtaaatagagagatatcagccgcactagcatcccctttcaatagttctccctttttaaaggtatttaatgcggatttagaaaactctctatctcttaatgaatttttaaaatcattatatagtgttgctatctcttgcgcgtattcgccgggatcacgattttgtctttcaggaaagctatcgaacgtaaacgtagtagccatacgtctcagaattctaaatgatgatataccagtttttatttctgcgagtttagccttttgataaatctcttcttgcttttttgacatattaacgtatcgcattaatactgttttcttagcgaatgatgcagacccttctacgttatcaaaaatagaaaactcgttattaactatgtacgaacataggcctcctagtttggagactaattctttttcatcgactagacgtttattctcaaatagtgattggtgttgtaaggatcctggtcgtagtaagttaaccaacatggtgaattcttgcacactattgacgataggtgtagccgataaacaaatcatcttatggttttttaatgcgatggtcttggataaaaaattatatactgaacgagtaggacggatcttaccatcttctttgattaatgatttagaaatgaagttatgacattcatcaataatgacgcatattctactcttggaattaatagttttgatattagtaaaaaatttatttctaaaattttgatcatcgtaattaataaaaatacaatccttcgttatctctggagcgtatctgagtatagtgttcatccaaggatcttctatcaaagcctttttcaccaataagataatagcccaattcgtataaatatccttaagatgtttgagaatatatacagtagtcattgttttaccgacacccgtttcatggaacaataaaagagaatgcatactgtctaatcctaagaaaactcttgctacaaaatgttgataatccttgaggcgtactacgtccgaccccatcatttcaacgggcatattagtagttctgcgtaaggcataatcgatataggccgcgtgtgatttactcatttatgagtgataagtaataactatgttttaaaaatcacagcagtagtttaactagtcttctctgatgtttgttttcgatactttttgaatcagaagtcatactagaataaagcaacgagtgaacgtaatagagagcttcgtatactctattcgaaaactctaagaacttattaatgaattccgtatccactggattgtttaaaatactaaattgaacactgttcacatccttccaagaagaagacttagtgacggacttaacatgagacataaataaatccaaattttttttacaaacatcactagccaccataatggcgctatctttcaaccagctatcgcttacgcattttagcagtctaacatttttaaagagactacaatatattctcatagtatcgattacacctctaccgaataaagttggaagtttaataatacaatatttttcgtttacaaaatcaaataatggtcgaaacacgtcgaaggttaacatcttataatcgctaatgtatagattgttttcagtgagatgattattagatttaatagcatctcgttcacgtttgaacagtttattgcgtgcgctgaggtcggcaactacggcgtccgctttagtactcctcccataatactttacgctattaatctttaaaatttcatagactttatctagatcgctttctggtaacatgatatcatgtgtaaaaagttttaacatgtcggtcggcattctatttagatcattaactctagaaatctgaagaaagtaattagctccgtattccagactaggtaatgggcttttacctagagacagattaagttctggcaatgtttcataaaatggaagaaggacatgcgttccctcccggatattttttacaatttcatccatttacaactctatagtttgttttcattattattagttattatctcccataatcttggtaatacttaccccttgatcgtaagataccttatacaggtcattacatacaactaccaattgtttttgtacataatagattggatggttgacatccatggtggaataaactactcgaacagatagtttatctttccccctagatacattggccgtaatagttgtcggcctaaagaatatctttggtgtaaagttaaaagttagggttcttgttccattattgctttttgtcagtagttcattataaattctcgagatgggtccgttctctgaatatagaacatcatttccaaatctaacttctagtctagaaataatatcggtcttattcttaaaatctattcccttgatgaagggatcgttaatgaacaaatccttggcctttgattcggctgatctattatctccgttatagacgttacgttgactagtccaaagacttacaggaatagatgtatcgatgatgttgatactatgtgatatgtgagcaaagattgttctcttagtggcatcactatatgttccagtaatggcggaaaactttttagaaatgttatatataaaagaattttttcgtgttccaaacattagcagattagtatgaagataaacactcatattatcaggaacattatcaatttttacatacacatcagcatcttgaatagaaacgataccatcttctggaacctcaacaatctcggcagactccggataaccagtcggtggaccatcgctaacaataactagatcatccaacaatctactcacatatgcatctatataatctttttcatcttgtgagtaccctggatacgaaataaatttattatccgtatttccataataaggtttagtataaacagagagcgatgttgccgcatgaacttcagttacagtcgccgttggttggtttatttgacctattactctcctaggtttctctataaacgatggtttaatttgtacattcttaaccatatatccaataaagctcaattcaggaacataaacaaattctttgttgaacgtttcaaagtcgaacgaagagtcacgaataacgatatcggatactggattgaaggttaccgttacggtaatttttgaatcggatagtttaagactgctgaatgtatcttccacatcaaacggagttttaatataaacgtatactgtagatggttctttaatagtgtcattaggagttaggccaatagaaatatcattaagttcactagaatatccagagtgtttcaaagcaattgtattattgatacaattattatataattcttcgccctcaatttcccaaataacaccgttacacgaagagatagatacgtgattaatacatttatatccaacatatggtacgtaaccgaatcttcccatacctttaacttctggaagttccaaactcagaaccaaatgattaagcgcagtaatatactgatccctaatttcgaagctagcgatagcctgattgtctggaccatcgtttgtcataactccggatagagaaatatattgcggcatatataaagttggaatttgactatcgactgcgaagacattagaccgtttaatagagtcatccccaccgatcaaagaattaatgatagtattattcattttctatttaaaatggaaaaagcttacaataaactccgtagagaaatatctataatttgtgagttttccttaaagtaacagcttccgtaaacgccgtctttatctcttagtaagtttattgtatttataaccttttccttatcttcatagaatactaaaggcaacaaagaaatttttggttcttctctaagagctacgtgagacttaaccatagaagccaacgaatccctacatattttagaacagaaataccctacttcaccacccttgtatgtctcaatactaataggtctaaaaaccaaatcttgattacaaaaccaacacttatcaattacactatttgtcttaatagacacatctgccatagatttataatactttggtagtatacaagcgagtgcttcttctttagcgggcttaaagactgctttaggtgctgaaataaccacatctggaaggcttactcgcttagccatttaattacggaactatttttttatacttctaatgagcaagtagaaaacctctcatctacaaaaacatactcgtgtccataatcctctaccatagttacacgttttttagatctcatatgtgctaaaaagttttcccatactaattggttactattatttttcgtataatttttaacagtttgaggttttagatttttagttacagaagtgatatcgaatattttatccaaaaagaatgaataattaattgtcttagaaggagtgttttcttggcaaaagaataccaagtgcttaaatatttctactacttcattaatcttttctgtactcagattcagtttctcatcttttacttgattgattatttcaaagactaacttataatcctttttatttattctctcgttagccttaagaaaactagatacaaaatttgcatctacatcatccgtggatatttgatttttttccatgatatccaagagttccgagataatttctccagaacattgatgagacaataatctccgcaatacatttctcaaatgaataagtttattagacacgtggaagtttgactttttttgtacctttgtacatttttgaaataccgactcgcaaaaaatacaatattcatatccttgttcagatactataccgttgtgtctacaaccgctacataatcgtagattcatgttaacactctacgtatctcgtcgtccaatattttatataaaaacattttatttctagacgttgccagaaaatcctgtaatacttttagttttttgggctgtgaataaagtatcgccctaatatggttaccgtcctccgccaatatagtagttaaattatccgcacatgcaaaagaacaccgcttaggcggattcagtacaatgttatatttttcgtaccaactcatttaaatatcataatctaaaatagttctgtaatatgtctagcgctaatatattgatcataatcctgtgcataaattaagatacaacaatgtctcgaaatcatcgacatggcttcttccatagttagaagatcgtcgtcaaagttagcaacgtgattcatcaacatttgctgttttgaggcagcaaatactgaaccgtcgccattcaaccattcataaaaaccatcgtctgaatccattgataatttcttgtactggtttttgagagctcgcatcaatctagcatttctagctcccggattgaaaacagaaagaggatcgtacatccagggtccattttctgtaaatagaatcgtataatgtcccttcaagaagatatcagacgatccacaatcaaagaattggtctccgagtttgtaacaaactgcggactttaacctatacatgataccgtttagcataatttctggtgatacgtcaatcggagtatcatctattagagatctaaagccggtgtaacattctccaccaaacatattcttattctgacgtcgttctacataaaacatcattgctccattaacgataacaggggaatgaacagcactacccatcacattagttcccaatggatcaatgtgtgtaactccagaacatcttccatagcctatgttaggaggagcgaacaccactcttccactattgccatcgaatgccatagaataaatatccttggaattgatagaaatcggactgtcggatgttgtgatcatcttcataggattaacaacgatgtatggtgccgcctgaagtttcatatcgtaactgatgccgttcataggtctagccacagaaaccaacgtaggtctaaatccaactatagacaaaatagaagccaatatctgttcctcatctgtcataacttgagagcatccagtatgaataatcttcattagatggggatctaccgcatcatcatcgttacaataaaaaattcccattctaatgttcataattgcttttctaatcatggtatgcatgtttgctctctgaatctctgtggaaattagatctgatacacctgtaatcactatcggattatcctccgtaagacgattaaccaacaacatataattataagactttacttttctaaattcataaagttgctggattaggctataggtgtctccatgtacatacgcgttctcgagcgcaggaagtttaataccgaatagtgccatcagaataggatgaatatagtaattagtttctggttttctataaataaaagacaaatcttgtgaactagacatatcggtaaaatgcatggattggaatcgtgtagtcgacagaagaatatgatgattagatggagagtatattttatctaactctttgagttggtcaccgattctaggactagctcgagaatgaataagtactaaaggatgagtacatttcacagaaacactagcattgttcaatgtgctctttacatgggtaaggagttgaaatagctcgtttctatttgttctgacaatatttagtttattcataatgttaagcatatcctgaatagtaaagttagatgtgtcatacttgttagtagttagatatttagcaattgcattcccatcatttctcaatctcgtactccaatcatgcgtggatgctacttcgtcgatggaaaccatacaatcctttttgataggctgttgagattgattatttcctgcacgtttaggtttggtacgttgatttctagcccctgcggatataaagtcatcgtctacaatttgggacaatgaattgcatacactacaagacaaagatttatcagaagtgtgaatatgatcttcatctaccaaagaaagagtttgattagtataactagattttagtcctgcgttagatgttaaaaaaacatcgctattgaccacggcttccattatttatattcgtagtttttactcgaaagcgtgattttaatatccaatcttattacttttggaatcgttcaaaacctttgactagttgtagaatttgatctattgccctacgcgtatactcccttgcatcatatacgttcgtcaccagatcgtttgtttcggcctgaagttggtgcatatctttttcaacactcgacatgagatccttaagggccatatcgtctagattttgttgagatgctgctcctggatttggattttgttgtgctgttgtacatactgtaccaccagtaggtgtaggagtacatacagtggccacaataggaggttgaggaggtgtaaccgttggagtagtacaagaaatatttccatccgattgttgtgtacatgtagttgttggtaacgtctgagaaggttgggtagatggcggtgtcgtcgtcttttgatctttattaaatttagagataatatcctgaacagcattgctcggcgtcaacgctggaaggagtgaactcgccggcgcatcagtatctgcagacagccaatcaaaaagattagacatatcagatgatgtattagtttgttgtcgtggttttggtgtaggagcagtactactaggtagaagaataggagccgatgtaggtgtcggaaccggctgtggagttatatgaatagttggttgtagcggttggataggctgtctgctggcggccatcatattatctctagctagttgttctcgcaactgtctttgataatacgactcttgagactttagtcctatttcaatcgcttcatcctttttcgtatccggatccttttcttcagaataatagattgacgactttggtgtagaggattctgccagcccctgtgagaacttgttaaagaagtccatttaaggctttaaaattgaattgcgattataagattaaatggcagacacagacgatattatcgactatgaatccgatgatctcactgaatacgaggatgatgaagaagaggaagaagatggagagtcactagaaactagtgatatagatcccaaatcttcttataagattgtagaatcagcatccactcatatagaagatgcgcattccaatcttaaacatatagggaatcatatatctgctcttaaacgacgctatactagacgtataagtctatttgaaatagcgggtataatagcagaaagctataacttgcttcaacgaggaagattacctctagtttcagaattttctgacgaaacgatgaagcaaaatatgctacatgtaattatacaagagatagaggagggttcttgtcctatagtcatcgaaaagaacggagaattgttgtcggtaaacgattttgacaaagatggtctaaaattccatctagactatattatcaaaatttggaaacttcaaaaacgatattagaatttatacgaatatcgttctctaaatgtcacaatcaagtctcgcatgttcagcaatttattgtcgtactttatatcgtgttcattaacgatatcttgcaaaatagtaatgattctatcttccttcgatagatattcttcagagattattgtcttatattctttcttgttatcagatatgaatttgataagactttgaacattattgatacccgtctgtttaattttttctacagatattttagttttggcagattctatcgtatctgtcaatagacatccaacatcgacattcgacgtcaattgtctataaatcaacgtataaattttagaaataacattagcgaattgttgtgcattgatgtcgttattctgaaacagtatgattttaggtagcattttcttaacaaagagaacgtatttattgttactcagttgaacagatgatatatccagattactaacgcatctgattccgtataccaaactttcagaagaaatggtatacaattgtttgtattcattcaatgtctctttttcagaaattagtttagagtcgaatactgcaataattttcaagagatagttttcatcagataagattttatttagtgtagatatgataaaactattgttttgttggagaacttgatacgccgcgttctctgtagtcgacgctctcaaatgggaaacgatctccattatttttttggaatcggatactatatcttcggtatcttgacgcagtctagtatacatagagttaagagagattagagtttgtacattaagcaacatgtctctaaatgtggctacaaacttttccttttccacatcatctagtttattatataccgatttcacaacggcaccagatttaaggaaccagaatgaaaaactctgataactacaatatttcatcatagttacgattttatcatcttctatagttggtgtaatagcgcatacctttttctccaagactggaaccaacgtcataaaaatgtttaaatcaaaatccatatcaacatctgatgcgctaagaccagtctcgcgttcaagattatctttactaatggtgacgaactcatcgtatagaactctaagtttgtccattatttatttacagatttagttgtttaatttatttgtgctcttccagagttgggatagtatttttctaacgtcggtattatattattaggatctacgttcatatgtatcataatattaatcatccacgttttgataaatctatctttagcttctgaaataacgtatttaaacaaaggagaaaaatatttagctacggcatcagacgcaataacattttttgtaaatgtaacgtatttagacgacagatcttcgttaaaaagttttccatctatgtagaatccatcagttgttaacaccattcccgcgtcagattgaataggagtttgaatagtttgttttggaaatagatccttcaataacttatagttgggtgggaaaaaatcgattttatcactagactctttcttttttactatcattacctcatgaactatttcttgaatgagtatatgtattttctttcctatatcggacgcgttcattggaaaatataccatgtcgttaactataagaatatttttatcctcgtttacaaactgaataatatcagatgtagttcgtaaacgaactatatcatcaccagcacaacatctaactatatgatatccactagtttcctttagtcgtttattatcttgttccatattagcagtcattccatcatttaagaaggcgtcaaagataatagggagaaatgacattttggattctgttacaactttaccaaaattaaggatatacggacttactatctttttctcaacgtcaatttgatgaacacacgatgaaaatgtacttcgatgagattgatcatgtagaaaacaacaagggatacaatatttccgcatatcatgaaatatattaagaaatcccaccttattatatttccccaaaggatccatgcacgtaaacattatgccgttatcattaataaagacttctttctcatcggatctgtaaaagttgttactgatttttttcattccaggatctagataattaataatgatgggttttctattcttattctttgtattttggcatatcctagaccagtaaacagtttccactttggtaaaatcagcagacttttgaacgctattaaacatggcattaatggcaataactaaaaatgtaaaatatttttctatgttaggaatatggtttttcactttaatagatatatggtttttggccaaaatgatagatatttttttatccgaggatagtaaaatattattagtcgccgtctctataaaaatgaagctagtctcgatatccaattttattctagaattgataggagtcgccaaatgtaccttatacgttatatctcccttgatgcgttccatttgtgtatctatatcggacacaagatctgtaaatagttttacgttattaatcatcacggtatcgccgtcgctagataatgctaatgtaccatccaagtcccaaatggagagatttaactgttcatcgtttagaataaaatgattaccggtcatattaataaagtgttcatcgtatctagataacaacgacttataattaatgtccaagtcttgaactcgctgaatgatcttttttaacccagttagttttagattggtacgaaatatattgttaaactttgattctacagtaatgtccaaatctagttgtggaaatacttccatcaacattgtttcaaacttgataatattattatctacatcttcatacgatccaaattccggaatagatgtatcacatgctcttgccacccagataaccaaaaagtcacacgctccaggatatacattgtataaaaagctatcgtttttaagtagggtttttttctgcgtgtatacgaagggattaaaaatagtattatcaacgtaactatattccaaattattcttatgagaatagataataatatcgtccttaatatctaacaaatttcctaaatatccctttaattgagtcattcgaagcgtcaatagaatatgtctcttaactatttccggctgttgtatatttaaatgacttcgtaaaaaataatatatgggcgacttctcatctatgtaatcatatggagtgagatatagggctcgttctacctcctgccccttacccacctgtaataccaattgcggacttactatatatcgcatatttatatcgtggggtaaagtgaaaatctactaccgatgatgtaagtcttacaatgttcgaaccagtaccagatcttaatttggaggcctccgtagaactaggggaggtaaatatagatcaaacaacacctatgataaaggaaaatagcggttttatatcccgtagtagacgtctattcgcccatagatctaaggatgatgagagaaaactagcactacgattctttttacaaagactttattttttagatcatagagagattcattatttgttcagatgcgttgacgctgtaaaagacgtcactattaccaaaaaaaataacattatcgtggcgccttatatagcacttttaactatcgcatcaaaaggatgcaaacttacagaaacaatgattgaagcattctttccagaactatataatgaacatagtaagaaatttaaattcaactctcaagtatccatcatccaagaaaaactcggataccagtttggaaactatcacgtttatgattttgaaccgtattactctacagtagctctggctattcgagatgaacattcatctggcatttttaatatccgtcaagagagttatctggtaagttcattatctgaaataacatatagattttatctaattaatctaaaatctgatcttgttcaatggagtgctagtacgggcgctgtaattaatcaaatggtaaatactgtattgattacagtgtatgaaaagttacaactggtcatagaaaatgattcacaatttacatgttcattggctgtggaatcagaacttccaataaaattacttaaagatagaaatgaattatttacaaaattcatcaacgagttaaaaaagaccagttcattcaagataagcaaacgcgataaggatacgctactaaaatattttacttaggactggagttagaatttatagacgactcatttcgtttatcattattactaccatcattattagtattcttcttgttatcttgttcagaaatatacagcaatgctatgcctaatactaaatacattatcatgcttgcaatggctctaacaacgacgaaccaaaatgaatttggtcgtagcttttgttcacaaaaatacataaagaaatgtctacataaatctatggcgccattggctacttgaaatagcgccagtcctcctacagattttaatatagctgtataacatgacatttattcatcatcaaaagagacagagtcaccatctgtcatatttagattttttttcatgtgttcaaagtatcctctactcatttcattataatagtttatcatacttagaattttaggacggatcaatgagtaagacttgactagatcgtcagtagtaatttgtgcatcgtctattctgcatccgcttcgtcgaataatgtatagcatcgctttgagattctccatagctatcaagtctttatacaatgacatggaaatatctgtgaatactttatacttctccaacatcgatgccttaacatcatcgcctactttagcattgaaaatacgttctattgtgtagatggatgtagcaagatttttaaacaacaatgccatcttacacgatgattgcctcaagtctccaatcgtttgtttagaacgattagctacagagttcaacgcttggctgactagcatattattatctttagaaattgtattcttcaatgaagcgtttatcatatctgtgatttcgttagtcatattacagtctgactgggttgtaatgttatccaacatatcacctatggatacggtacacgtaccagcatttgtaataatcctatctaagatgttgtatggcattgcgcagaaaatatcttctcctgtaatatctccactctcgataaatctactcagattattcttaaatgccttattctctggagaaaagatatcagtgtccatcatttcattaatagtatacgcagaaaagataccacgagtatcaattctatccaagatacttatcggttccgagtcacagataatggtttcctctccttcgggagatcctgcatagaaatatctaggacaatagtttctatactgtctgtaactctgataatctctaaagtcactaactgataccatgaaattgagaagatcaaacgctgaagtaatcaatttttctgcctcgtttttactacaactagttttcatcaatgtagtgacgatgtattgtttagttactcttggtctaatactgatgatagagatattattacttcccataatggatcttctagtagtcaccttaaagcccattgatgcaaatagcagatagataaagtcttggtatgactcctttctaatatagtacggactacctttgtcacccaactttatacccacataagccataacaacctctttaatagccgtttcatgaggtttatcagccatgagcctgagtagttggaagaatctcatgaatcccgtctcagaaagtcctatatgcatgatagatttatctttcctgggaaactctcgtatagtcatagatgaaatactcttcaaagtttctgaaataagattagtaacagtcttacctccgactactctgggtaacaaacatactctaataggtgttttctctgcggagataatatcagaaaggatagagcaataagtagtattattgtgattataaagaccgaatacataacaggtagaatttataaacatcatgtcctgaaggtttttagacttgtattcctcgtaatccataccgtcccaaaacatggatttggtaactttgatagccgtagatctttgttccttcgccaacaggttaaagaaattaataaagaatttgttgtttctatttatgtccacaaattgcacgtttggaagcgtaactgttacgttcactgcagcattttgaggatcgcgagtatgaagtacgatgttattgtttactggtatatctggaaagaaatctaccagtctaggaataagagattgatatcgcatagaaatagtaaagtttataatctcatcatcgaagagcattttgttaccattgtaataaatatccactctgtcatatgtataaatgaagtactgttcaaacatgatgagatgtttatatgttggcatagtagtgagatcgacgtttggtaatggcaatgtattaagattaactccataatgtctagcagcatctgcgatgttataagtgtcgtcaaagcggggtcgatcttgtgctgttatatattgtctaacacctataagattatcaaaatcttgtctgcttaatacaccgttaacaatttttgccttgaattcttttattggtgcattaataacatccttatagaggatgttaaacaaataagtgttatcaaagttaagatctggatatttcttttctgctagaacatccattgagtcggagccatctggtttaatataaccaccgataaatctagctctgtattctgtatccgtcaatctaatattaagaaggtgttgagtgaaaggtggaagatcgtaaaagctgtgagtattaatgataggattagtttccgaactaatgttaattggggtattaataatatctatatttccagcgttaagtgtaacattaaacagttttaattcacgtgacgtggtatcaattaaataattaatgcccaatttggatatagcagcctgaagctcatcttgtttagttacggatcctaatgagttattaagcaatatatcgaacggatgaacgaaggttgttttaagttggtcacatactttgtaatctagacatagatgcggaagaacggtagaaactatacgaaataaatattcagagtcctctaattgatcaagagtaactattgacttaataggcatcatttatttagtattaaatgacgaccgtaccagtgacggatatacaaaacgatttaattacagagttttcagaagataattatccatctaacaaaaattatgaaataactcttcgtcaaatgtctattctaactcacgttaacaacgtggtagatagagaacataatgccgccgtagtgtcatctccagaggaaatatcctcacaacttaatgaagatctatttccagatgatgattcaccggccactattatcgaacgagtacaacctcatactactattattgacgatactccacctcctacttttcgtagagagttattaatatcggaacaacgtcaacaacgagaaaaaagatttaatattacagtatcgaaaaatgctgaagcaataatggaatctagatctatgataacttctatgccaacacaaacaccatccttgggagtagtttatgataaagataaaagaattcagatgttagaggatgaagtggttaatcttagaaatcaacgatctaatacaaaatcatctgataatttagataattttaccaaaatactatttggtaagactccgtataaatcaacagaagttaataagcgtatagccatcgttaattatgcaaatttgaacgggtcccccttatcagttgaggacttggatgtttgttcggaggatgaaatagatagaatctataaaacgattaaacaatatcacgaaagtagaaaacgaaaaattatcgtcactaacgtgattattattgtcataaacattatcgagcaggcattgctaaaactcggatttgaagaaatcaaaggactgagtaccgatatcacttcagaaattatcgatgtggagatcggagatgactgcgatgctgtagcatctaaactaggaatcggtaacagtccggttcttaatattgtattgtttatactcaagatattcgttaaacgaattaaaattatttaatttaatacattcccatatccagacaacaatcgtctggattaatctgttcctgtcgtctcataccggacgacatattaatctttttattagtaggcatctttttagatggtttctttttcccagcattaactgagtcgatacctagaagatcgtgattgatctctccgaccattccacgaacttctaattggccgtctctgacggtaccataaactattttaccagcattagtaacagcttggacaatctgaccatccattgcgttgaatgatgtagttgctgttgttctacgtttaggagcaccagaagtatttttggagcccttggaggctgatgtagaagaagacgaggattttgatttacatgtaatacattttgtactctttgattttgtatcacatgcgccggcagtcacatttgtttgagaattaagattattgttgcctcctttgacggctgcatctccaccgatttgcgctagtagatttttaagctgtggtgtaatcttattaactgtttcgatataatcatcgtaactgcttctaacggctaaattttttttatccgccatttagaagctaaaaatatttttatttatgcagaagatttaactagattatacaatgaactaatatgatccttttccagattatttacaaacttggtattttttggttctggaggaggcgaatttaaattcggacttggattcggattttgtgagttcttgatcttattatacatcgagtataggatggcgacggtaactgctacgcaaataccgatcaacaaaagaataccaatcatttattgacaataacttcactattgatcaagtatgcaatatatcatcttttcactaaataagtagtaataatgattcaacaatgtcgagatatatggacgataataatttagttcatggaaatatcgctatgattggtatgaatgactccgctaactctgtggggtgcgcagtgctttccccacatagaataaattagcattccgactgtgataataataccaagtataaacgccataatactcaatactttccatgtacgagtgggactggtagacttactaaagtcaataaaggcgaagatacacgaaagaatcaaaagaatgattccagcgattagcacgccggaaaaataatttccaatcataagcatcatgtccatttaactaataaaaattttaaatcgccgaatgaacaaagtggaatataaaccatataaaaacaatagtttgtactgcaaaaataatatctatttttgttttcgaagatatggtaaaattaaatagtagtacacagcatgttataactaacagcagcaacggctcgtaattacttatcatttactagacgaaaaggtggtgggatattttcttgctcaaataatacgaatatatcacccatccattttatgcgatgtttatatactctaatctttaatagatctatagacgacgggtttaccaacaatatagattttatcgattcatctaatttaaacccttccttaaacgtgaatgatctattatctggcataacgatgactctacctgatgaatcggacaatgtactgggccatgtagaataaattatcaacgaattatcgtctacgaacatttatatcatttgttttaattttaggacgcgaataaatggatataaaatagaaaataacagatattacaaccaatgttatggccgcgcccaaccaggtaggcagttttattttatcttttactacaggttctcctggatgtacgtcaccaacggcggacgtagttctagtacaattagacgtaagttctgcttgggaattttttaacgctaaagagttaacgttaatcgtgcacccaacgtatttacatctagttctttgaacatcttgattataatataaccattttctatctctagattcgtcggtgcactcatgtaaccaacataccctaggtcctaaatatttatctccggaattagattttggataattcgcgcaccaacaatttctatttcctttatgatcgttacaaaagacgtataatgccgtatccccaaaagtaaaataatcaggacgaataattctaataaactcagaacaatatctcgcatccatatgtttggagcaaatatcggaataagtagacatagccggtttccgttttgcacgtaaccattctaaacaattggggtttccaggatcgtttctacaaaatccagtcatgaaatcatcacaatgttctgtcttgtaattattattaaatatttttggacagtgtttggtatttgtcttagaacaacattttgccacgctatcactatcgcccaggagataatccttttttataaaatgacatcgttgcccggatgctatataatcagtggcgtgttttaaatccttaatatattcaggagttacctcgttctgataatagattaatgatccaggacgaaatttgaaagaactacatggttctccatgaattaatacatattgtttagcaaattcaggaactataaaactactacaatgatctatcgacataccatctatcaaacaaaacttgggtttaatttctcccggagatgtttcataatagtacgtataactttcttctgcaaacttaacagctctattatattcaggataattaaaacctaattccatatatttgtctcgtatatctgctattcctggtgctattttaattctattaagagtaacggctgcccccattcttaataatcgtcagtatttaaactgttaaatgttggtatatcaacatctaccttatttcccgcagtataaggtttgttgcaggtatactgttcaggaatggttacatttatacttcttctatagtcctgtctttcgatgttcatcacatatgcaaagaacagaataaacaaaataatgtaagaaataatattaaatatctgtgaattcgtaaatacattgattgccataataattacagcagctacaatacatacaatagacattcccacagtgttgccattacctccacgatacatttgagttactaagcaataggtaataactaagctagtaagaggcaatagaaaagatgagataaatatcatcaatatagagattagaggagggctatatagagccaagacgaacaaaatcaaaccgagtaacgttctaacatcattatttttgaagattcccaaataatcattcattcctccataatcgttttgcattatacctccatctttaggcataaacgattgctgctgttcctctgtaaataaatctttatcaagcactccagcacccgcagagaagtcgtcaagcatattgtaatatcttaaataactcatttatatattaaaaaatgtcactattaaagatggagtataatctttatgccgaactaaaaaaaatgacttgtggtcaacccctaagtctttttaacgaagacggggatttcgtagaagttgaaccgggatcatcctttaagtttctgatacctaagggattttacgcctctccttccgtaaagacgagtctagtattcgagacattaacaacgaccgataataaaatcactagtatcaatccaacaaatgcgccaaagttatatcctcttcaacgcaaagtcgtatctgaagtagtttctaatatgaggaaaatgatcgaatcaaaacgtcctctatacattactcttcacttggcgtgtggatttggtaagactattaccacgtgttatcttatggctacacacggtagaaaaaccgtcatttgcgtacccaataaaatgttaatacatcaatggaagacacaggtagaggcagtcggattggaacataagatatctatagatggagtaagtagtctattaaaggaactaaagactcaaagtccggatgtattaatagtagtcagtagacatctgacaaacgatgccttttgtaaatatatcaataagcattatgatttgttcatcttggatgaatcacatacgtataatctgatgaacaatacagcagttacaagatttttagcgtattatcctccgatgatgtgttattttttaactgctacacctagaccagctaaccgaatttattgtaacagtattattaatattgccaagttatccgatctaaaaaaaactatctatgcggtagatagtttttttgagccatattccacagacaatattagacatatggtaaaacgactagatggaccatctaataaatatcatatatatactgagaagttattatctgtagacgagcctagaaatcaacttattcttgataccctggtagaagaattcaagtcaggaactattaatcgaattttagttattactaaactacgtgaacatatggtattcttctacaaacgattattagattttttcggatcagaggttgtatttataggagacgcccaaaatagacgtactccagatatggtcaaatcaatcaaggaactaaatagatttatattcgtatccaccttattttattccggtactggtttagatattcctagtttggattcgttgttcatttgctcggcagtaatcaacaatatgcaaatagagcaattactagggagggtatgtcgagaaacagaactattagataggacggtatatgtatttcctaacacatccatcaaagaaataaagtacatgataggaaatttcatgcaacgaattattagtctgtctgtagataaactaggatttaaacaaaaaagttatcggaaacatcaagaatccgatcccacttctgtatgtacaacatcctccagagaagaacgtgtattaaatagaatatttaactcgcaaaatcgttaagaagtttaagcgacgatccgcatgctgcgcaggccagtgtattacccctcatagtattaatataatccaatgatacttttgtgatgtcggaaatcttaaccaatttagactgacaggcagaacacgtcatgcaatcatcatcgtcatcgataactgtagtcttgggcttctttttgcggctcttcattccggaacgcacattggtgctatccatttaggtagtaaaaaataagtcagaatatgccctatagcacgatcgtgcaaaacctggtatatcgtctctatctttatcacaatatagtgtatcgacatttttattattattgacctcgtttatcttggaacatggaatgggaacatttttgttatcaacggccatctttgccttaattccagatgttgtaaaattataactaaacagtctatcatcgacacaaatgaaattcttgtttagacgtttgtagtttacgtatgcggctcgttcgcgtctcattttttcagatattgcaggtactataatattaaaaataagaatgaaataacataggattaaaaataaagttatcatgacttctagcgctgatttaactaacttaaaagaattacttagtctgtacaaaagtttgaaattttcagattctgcggctatagaaaagtataattctttggtagaatggggaacatctacttactggaaaataggcgtgcaaaaggtagctaatgtcgagacgtcaatatctgattattatgatgaggtaaaaaataaaccgtttaatattgatccgggatattacattttcttaccggtatattttggaagcgtctttatttattcgaagggtaaaaatatggtagaacttggatctggaaactcttttcaaataccagatgatatgcgaagtgcgtgtaacaaagtattagacagcgataacggaatagactttctgagatttgttttgttaaacaatagatggataatggaagatgctatatcaaaatatcagtctccagttaatatatttaaactagctagtgagtacggattaaacatacccaaatatttagaaattgaaatagaggaagacacattatttgacgacgagttatactctattatagaacgctctttcgatgataaatttccaaaaatatccatatcgtatattaagttgggagaacttagacggcaagttgtagactttttcaaattctcgttcatgtatattgagtccatcaaggtagatcgtataggagataatatttttattcctagcgttataacaaaatcaggaaaaaagatattagtaaaagatgtagaccatttaatacgatccaaggttagagaacatacatttgtaaaagtaaaaaagaaaaacacattttccattttatacgactatgatggaaacggaacagaaactagaggagaagtaataaaacgaattatagacactataggacgagactattatgttaacggaaagtatttctctaaggttggtagtgcaggcttaaagcaattgactaataaattagatattaatgagtgcgcaactgtcgatgagttagttgatgagattaataaatccggaactgtaaaacgaaaaataaaaaaccaatcagcatttgatttaagcagagaatgtttgggatatccagaagcggattttataacgttagttaataacatgcggttcaaaatagaaaattgtaaggttgtaaatttcaatattgaaaatactaattgtttaaataacccgagtattgaaactatatatggaaactttaaccagttcgtctcaatctttaatatcgtcaccgatgtcaaaaaaagattattcgagtgaaataatatgcgcctttgatataggtgcaaaaaatcctgccagaactgttttagaagtcaaggataactccgttagggtattggatatatcaaaattagactggagttctgattgggaaaggcgcatagctaaagatttgtcacaatatgaatacactacagttcttctagaacgtcagcctagaaggtcgccgtacgtcaaatttatctattttattaaaggctttttatatcatacatcggctgccaaagttatttgcgtctcgcctgtcatgtctggtaattcatatagagatcgaaaaaagagatcggtcgaagcatttcttgattggatggacacattcggattgcgagactccgttccggatagacgcaaattagacgatgtagcggatagtttcaatttggctatgagatacgtattagataaatggaatactaattatacaccttataataggtgtaaatctagaaattacataaaaaaaatgtaataacgttagtaacgccattatggataatctatttacctttctacatgaaatagaagatagatatgccagaactatttttaactttcatctaataagttgcgatgaaataggagatatatatggtcttatgaaagaacgcatttcctcagaggatatgtttgataatatagtgtataataaagatatacatcatgccattaagaaactagtgtattgcgacatccaacttactaaacacattattaatcagaatacgtatccggtatttaacgattcttcacaagtgaaatgttgtcattatttcgacataaactcagataatagcaatattagctctcgtacagtagagatatttgagagggaaaagtcatctcttgtatcatatattaaaactaccaataagaagagaaaggtcaattacggcgaaataaagaaaactgttcatggaggcactaatgcaaattacttttccggtaaaaagtctgacgagtatctgagtactacagttagatccaacattaatcaaccttggatcaaaaccatctctaagaggatgagagttgatatcattaatcactctatagtaacgcgtggaaaaagctctatattacaaactatagaaattatttttactaatagaacatgtgtgaaaatattcaaggattctactatgcacattattctatccaaggacaaggatgaaaaggggtgtatacacatgattgacaaattattctatgtctattataatttatttctgttgttcgaggatatcatccaaaacgagtactttaaagaagtagctaatgttgtaaaccacgtacttacggctacggcattagatgagaaattattcctaattaagaaaatggctgaacacgatgtttatggagttagcaatttcaaaatagggatgtttaacctgacatttattaagtcgttggatcataccgttttcccctctctgttagatgaggatagcaaaataaagttttttaaggggaaaaagctcaatattgtagcattacgatctctggaggattgtataaattacgtgactaaatccgagaatatgatagaaatgatgaaggaaagatcgactattttaaatagcatagatatagaaacggaatcggtagatcgtctaaaagaattgcttctaaaatgaaaaaaaacactgattcagaaatggatcaacgactcggatataagtttttggtgcctgatcctaaagccggagttttttatagaccgttacatttccaatatgtatcgtattctaattttatattgcatcgattgcatgaaatcttgaccgtcaagcggccactcttatcgtttaagaataatacagaacgaattatgatagaaattagcaatgttaaagtgactcctccagattactcacctataatcgcgagtattaaaggtaagagttatgacgcattagccacgttcactgtaaatatctttaaagaggtaatgaccaaagagggtatatccatcactaaaataagtagttatgagggaaaagattctcatttgataaaaattccgctactaataggatacgggaataaaaatccacttgatacagccaagtatcttgttcctaatgtcataggtggagtctttatcaataaacaatctgtcgaaaaagtaggaattaatctagtagaaaagattacaacatggccaaaatttagggttgttaagccaaactcattcactttctcgttttcctccgtatcccctcctaatgtattaccgacaagatatcgccattacaagatatctctggatatatcacaattggaagcgtcgaatatatcatcgacaaagacatttataacggtcaatattgttttgctgtctcaatatttatctagagtgagtctagaattcattagacgtagcttatcatacgatatgcctccagaagttgtctatctagtaaacgcgataatagatagtgctaaacgaattactgaatctattactgactttaatattgatacatacattaatgacctggtggaagctgaacacattaaacaaaaatctcagttaacgatcaacgagttcaaatatgaaatgctgcataactttttacctcatatgaactatacacccgatcaactaaagggattttatatgatatctttactaagaaagtttctctactgtatctaccacacttctagatatccagatagagattcgatggtttgtcatcgtatactaacatacggcaaatattttgagacgttggcacatgatgaattagagaattacataggcaacatccgaaacgatatcatgaacaatcacaagaacagaggcacttacgcggtaaacattcatgtactaacaactcctggacttaatcatgcattttctagtctattgagtggaaagttcaaaaagtcagacggtagttatcgaacacatcctcactattcatggatgcagaatatttctattcctaggagtgttggattttatccggatcaagtaaagatttcaaagatgttttctgtcagaaaataccatccaagtcaatatctttacttttgttcatcagacgttccggaaagaggtcctcaggtaggtttagtatctcaattgtctgtcttgagttccattacaaatatactaacgtctgagtatttggatttggaaaagaaaatttgtgagtatatcagatcatattataaagatgatataagttactttgaaacaggatttccaatcactatagaaaatgctctagtcgcatctcttaatccaaatatgatatgtgattttgtaactgactttagacgtagaaaacggatgggattcttcggtaacttggaggtaggtattactttagttagggatcacatgaatgaaattcgcattaatattggagcgggaagattagtcagaccattcttggttgtggataacggagagctcatgatggatgtgtgtccggagttagaaagcagattagacgacatgacattctctgacattcagaaagagtttccgcatgtcatcgaaatggtagatatagaacaatttacttttagtaacgtatgtgaatcggttcaaaaatttagaatgatgtcaaaggatgaaagaaagcaatacgatttatgtgactttcctgccgaatttagagatggatatgtggcatcttcattagtgggaatcaatcacaattctggacccagagctattcttggatgtgctcaagctaaacaagctatctcttgtctgagctcggatatacgaaataaaatagacaatggaattcatttgatgtatccagagaggccaatcgtgattagtaaggctttagaaacttcaaagattgcggctaattgcttcggccaacatgttactatagcattaatgtcgtacaaaggtatcaatcaagaggatggaattatcatcaaaaaacaatttattcagagaggcggtctcgatattgttacagccaagaaacatcaagtagaaattccattggaaaactttaataacaaagaaagagataggtctaacgcctattcaaaattagaaagtaatggattagttagactgaatgctttcttggaatccggagacgctatggcacgaaatatctcatcaagaactcttgaagatgattttgctagagataatcagattagcttcgatgtttccgagaaatataccgatatgtacaaatctcgcgttgaacgagtacaagtagaacttactgacaaagttaaggtacgagtattaaccatgaaagaaagaagacccattctaggagacaaatttaccactagaacgagtcaaaagggaacagtcgcgtatgtcgcggatgaaacggaacttccatacgacgaaaatggtatcacaccagatgtcattattaattctacatccatcttctctagaaaaactatatctatgttgatagaggttattttaacagccgcatattctgctaagccgtacaacaataagggagaaaaccgacctgtctgttttcctagtagtaacgaaacatccatcgatacatatatgcaattcgctaaacaatgttatgagcattcaaatccgaaattgtctgatgaagaattatcggataaaatcttttgtgaaaagattctctatgatcctgaaacggataagccttatgcatccaaagtattttttggaccaatttattacttgcgtctgagacatttaactcaggacaaggcaaccgttagatgtagaggtaaaaagacgaagctcattagacaggcgaatgagggacgaaaacgtggaggaggtatcaagttcggagaaatggagagagactgtttaatagcgcatggtgcagccaatactattacagaagttttgaaagattcggaagaagattatcaagatgtgtatgtttgtgaaaattgtggagacatagcagcacaaatcaagggtattaatacatgtcttagatgttcaaaacttaatctctctcctctcttaacaaaaattgataccacacacgtatctaaagtatttcttactcaaatgaacgccagaggcgtaaaagtcaaattagatttcgaacgaagacctccttcgttttataaaccattagataaagttgatctcaaaccgtcttttctggtctaatattgtttagtagatacttatcaacatcatcaagattatcaagattatcaagattatcaagataagctaattcactaaacacattatcgatttcggtatcgttactcgcagaataaagttcgttatgatcctgatattcggaaatctgtggagtttcaggttttggtggatgtgtaacagctacttgagataccgaagtctgatattcagaaagctgtggatgttctggttcggcatccaccgatggtgttacaccactactaattggttcagtaacgtctgtggacgatggaggcaccacttctacaggttctggttctttatcctcagtcatcaacggagctacttcaatgcgaggaaatgtataatttggtaatggtttctcatgtggatctgaagaagaggtaagatatctactagaaagataccgatcacgttctagttctcttttgtagaacttaactttttctttctcagcatctagttgatattccaacctcttcacgttactacgttcagatttcaattcacgttcgcatgggttacctccgcagtttttacgagcgatttcacgttcagccttcatgcgtctctccctctctctatcgagtttatcagagcagtctttctgaaggcgatcgaactccataaatttctccaacgctttgattgtttccatagatttccgaagttcagcttttaggactgtgattctttttctttcgaattcacagctggatgtacaaccgtttccattaccgccatctctaagtttcttttctagatcggcaacatttcatccccatgccttttacattcctcgagtctactgtcgtcgaaatatcgttccagctccttttcgacatcaataactttagcacgttgtctctcaagctctcttttgtagttatctgattccctggcacgtttaagatcttcatgcaattgagtcagctcttaacacaatctcttgcttcttcgtcatagtacgcgcaatcactgtgagatccattgttaccacgtctacactcggcgagctcgcgtttaagagattcaatttcccgtttgtattggtccatgtttccattgctaccaccattagatttacaggctgctagttgtcgttcgagatcagaaatacgggttttcttggaattgatttcgtcgatgtacttggcatcgaaacacttattaagttctttttccaattctacgattttatttctttcgcgagtcaattccctcctgtagtaactatctgttttgtcagattcacgctctctacgtagactttcttgcaagttactaatttgttccctagcacgtccgagtttagttttatatgctgaatagagttctgattcatcctttgagcagatctctagcgatcgtttaagattcctgattctagtctttagcctatttacctcctcagaagatgttccgttaccgttgcgtttacactcgttaagctgtctatcaagatccatgattctatctctaagacgttgcatctctctttccatatcagcattgctttcattattacgtctgcagtcactcaactgtctttcaatatctgagattctatctctaagacgtcgcatctctctctgtttcggcattggtttcattattacgtctacagtcgttcaactgtctttcaagatctgatattctagattggagtctgctaatctctgtagcattttcacggcattcactcagttgtctttcaagatctgaaattttagattggagtctgctaatctctgtaagatttcctcctccgctctcgatgcagtcggtcaacttattctctagttctctaatacgcgaacgcagtgcatcaacttcttgcgtgtcttcctggttgcgtgtacattcatcgagtctagattcgagatctctaacgcgtcgtcgttcttcctcaagttctctgcgtactacagaaagcgtgtccctatcttgttgatatttagcaatttctgattctagagtactgattttgcttacgtagttactaatatttgtcttggccttatcaagatcctccttgtatttgtcgcattccttgatatccctacgaagtctggacagttcccattcgacattacgacgtttatcgatttcagctcggagatcgtcatcgcgttgttttagccacatacgactgagttcaagttctcgttgacaagatccatctacttttccattcctaatagtatccagttccttttctagttctgaacgcatttctcgttccctatcaagcgattctctcaattctcggatagtcttcttatcaatttctaataaatctgaaccatcatctgtcccattttgaatatccctgtgttctttgatctcttttgtaagtcggtcgattctttcggttttataaacagaatccctttccaaagtcctaatcttactgagtttatcactaagttctgcattcaattcggtgagttttctcttggcttcttccaactctgttttaaactctccactatttccgcattcttcctcgcatttatctaaccattcaattagtttattaataactagttggtaatcagcgattcctatagccgttcttgtaattgtgggaacataattaggatcttctaatggattgtatggcttgatagcatcatctttatcattattagggggatggacaaccttaattggttggtcctcatctcctccagtagcgtgtggttcttcaatagccgtgttagtaataggcttaggcaaatgcttgtcgtacgcgggcacttcctcatccatcaagtatttataatcgggttctacgtctgaatattcttttctaagagacgcaacttctggagttagtagaagaactctgtttctatatctatcaacgctggaatcaatactcaagttaaggatagcgaatacctcatcgtcatcatccgtatcctctgaaacgccatcatatgacatttcatgaagtctaacgtattgataaacagaatcagatttagtattaaacagatccttaacctttttagtaaatgcatatgtatattttagatctccagatttcataatatggtcgcatgccttaaatgtcagtgcttccataatatagtctggaacactaattggtgatgaaaaagataccggaccatatgctacgttgataaataactctgagccactaactagataatgattaatgttaaggaagaggaaatattcagtgtataggtatgtcttggcgtcatatcttgtactaaacacgctaaacagtttgttaatgtgatcaatttccaatagattaattagagcagcaggaataccaacaaacatattaccacatccgtattttctatgaatatcacatatcatgttaaaaaatcttgatagaagagcgaatatctcgtctgacttaatgagtcgtagttcagcagcaacataagtcataactgtaaatagaacatactttcctgtagtgttgattctagactccacatcaacaccattattaaaaatagttttatatacatctttaatctgctctccgttaatcgtcgaacgttctagtatacggaaacactttgatttcttatctgtagttaatgacttagtgatatcacgaagaatattacgaattacatttcttgtttttcttgagagacctgattcagaactcaactcatcgttccatagtttttttacctcagtggcgaaatctttggagtgcttggtacatttttcaataaggttcgtgacctccatttattataaaaaaattttattcaaaacttaactacaatcgggtaattataaaatcgtagatctcccatgtggtggaatactaccatctatcgcatgtggatggacagtaggtaatggccatgggaacagtaatgtttgcatatttatctttcttgccagtattactgcatattgtcccaatgtttcgatgtgatgttctaacctatcaactgccgctgtatcacaacaatagtgtccgatgaaattaagattatgatccaatgtgtttaatatatgattatcaagtcttatacgatccgcgtcttttttgacaggatcaggttcttctacaggaagaagtttcggcctcttatgatattcatgtctgggaaacggtggtctagggtgaggctccggtatcggagtgggttttggattataatcatcatcgtctatgacatcatcttcgacttcgatatttattttgctatcttgatgatgtcctgtatcagttgcattttcagcactcgactgaatattagcgcattcattgtttattattaccatatttctaaacccaaaatgtatatgttgaacatcagtactatcgttgatgagtcttatagcatgaattcgcttatcgttatcgggtttagcttctgtcaccttagcaattccttttttattaaactctacataatcatatccatttctattgtttgttctaatataaacgagtatagcatcattgctaaatttttcaatagtatcgaaaacagaatatcctaaaccatataatatatattcaggaacactcaaactaaatgtccaggattctcctaaatacgtaaactttaatagtgcgaaatcattcaaaaatctaccacttatagatagatagtacataaatgcgtatagtagtctacctatctctttattatgaaaaccggcattacgatcatatatgtcgtgatatacctgtgatccgtttacgttaaaccataaatacatgggtgatcctataaacatgaatttatttctaattctcagagctatagttaattgaccgtgtaatatttgcttacatgcatacttgatacgctcattaataagatttttatcattgctcgttatctcagaatcgtatatataaggagtaccatcgtgattcttaccagatattatacaaaatactatatataaaatatattgaccaacgttagtaatcatataaatgtttaacgttttaaattttgtattcaatgatccattatcatacgctagcatggtcttatgatattcattctttaaaatataatattgtgttagccattgcattggggctcctaatggagattttttattctcatccattttaggataggctttcataaagtccctaataacttcgtgaataatgtttctatgttttctactgatgcatgtatttgcttcgatttttttatcccatgtttcatctatcatagatttaaacgcagtaatgctcgcaacattaacatcttgaaccgttggtacaattccgttccataaatttataatgttcgccatttatataactcattttttgaatatacttttaattaacaaaagagttaagttactcatatggacgccgtccagtctgaacatcaatctttttagccagagatatcatagccgctcttagagtttcagcgtgattttccaacctaaatagaacttcatcgttgcgtttacaacacttttctatttgttcaaactttgttgttacattagtaatctttttttccaaattagttagccgttgtttgagagtttcctcattgtcgtcttcatcggctttaacaattgcttcgcgtttagcctctggctttttagcagcctttgtagaaaaaaattcagttgctggaattgcaagatcgtcatctccggggaaaagagttccgtccatttaaagtacagattttagaaactgacactctgcgttatttatatttggtacaacacatggattataaatattgatgttaataacatcagaaaatgtaaagtctatacattgttgcatcgtgttaaattttctaatggatctagtattattgggtccaacttctgcctgaaatccaaatatggaagcggatacaaaaccgtttcctggataaaccacacatctccacttttgctttacatcagaaattgtgtcattgacatcttgaactctcctatctaatgccggtgttccacctatagattttgaatattcgaatgctgcatgagtagcattaaattccttaatattgccataattttcatatattgagtaaccctggataaaaagtaaacacaccgcagccgtcgctaccacaataaaaaaaattgatagagagttcatttataatctattagaagctgacaaaatttttttacacgcatcagacaatgctttaataaatagttcaacatctacttttgtcatatcgaaccgatggtatgattctaacctagaattacatccgaaaaagttgactatgttcatagtcattaagtcattaacaaacaacattccagactctggattataagacgatactgtttcgtcacaattacctaccttaatcatgtgattatgaatattggctattagagcaccttctaagaaatctataatatctttgaaacacgatttaaaatcaaaccacgaatatacttctacgaagaaagttagtttacccataggagaaataactataaatggagatctaaatacaaaatccggatctatgatagttttaacattattatattctctattaaatacctccacatctaaaaatgttaattttgaaactatgtcttcgtttattaccgtacctgaactaaacgctataagctctattgtttgagaactctttaaacgatattcttgaaatacatgtaacaaagtttcctttaactcggtcggtttatctaccatagttacagaatttgtatccttatctataatataataatcaaaatcgtataaagttatataattatcgcgttcagattgtgatcttttcaaatagactaaaaaccccatttctctagtaagtatcttatgtatatgtttgtaaaatatcttcatggtgggaatatgctctaccgcagttagccattcctcattgacagcggtagatgtattagacaaaactattccaatgtttaacaagggccattttacgagattattaaatccttgtttgataaatgtagccaatgagggttcgagttcaacgacgattgaattctcttcccgcggatgctgcatgatgaacgacgggatgttgttcgattgatttggaattctttttcgactttttgtttatattaaatattttaaaatttatagctgatagcaattcatgtactacggataatgtagacgcgtattgcgcatcgatatctttattattagataaatttatcaataaatgtgagaagtttgcctcgttaaggtcttccatttaaatattatataaacatttgtgtttgtatcttattcgtcttttatggaatagttttttactagtaaagctgcaattacacactttgtccgtaaaacataaatataaacaccagcttttatcaatcgttccaaaaagtcgacggcggacatttttaacatggcatctattttaaatacacttaggtttttggaaaaaacatcattttataattgtaacgattcaataactaaagaaaagattaagattaaacataagggaatgtcatttgtattttataagccaaagcattctaccgttgttaaatacttgtctggaggaggtatatatcatgatgatttggttgtattggggaaggtaacaattaatgatctaaagatgatgctattttacatggatttatcatatcatggagtgacaagtagtggagcaatttacaaattgggatcgtctatcgatagactttctctaaataggactattgttacaaaagttaataattatgatgatacattttttgacgacgatgattgatcgctattgcacaattttgtttttttactttctaatatagcgtttagattctttttcatgtgcgaatattgatttactaaaatatcgatgtttaacttttgttctatgacgtccttatcagcggtatcggtacatatacgtaattcaccttcacaaaatacggagtcttcgataataatagccaatcgattattggatctagcggtctgtatcatattcaacatgtttaatatatcctttcgtttcccctttacaggcatcgatcgtagcatattttccgcgtctgagatggaaatgttaaaactacaaaaatgcgtaatgttagcccgtcctaatattggtacgtgtctataagtttggcatagtagaataatagacgtgtttaaatgccttccaaagtttaagaattctattagagtattgcattttgatagtttatcgcctacatcatcaaaaataagtaaaaagtgtgctgattttttatgattttgtgcgacagcaatacatttttctatgttacttttagttcgtatcagattatattctagagattcctgactactaacgaaattaatatgatttggccaaatgtatccatcataatctggattataaacgggtgtaaacaagaatatatgtttatattttttaactagtgtagaaaacagagatagtaaatagatagtttttccagatccagatcctcccgttaaaaccattctaaacggcatttttaataaattttctcttgaaaattgtttttcttggaaacaattcataattatatttacagttactaaattaatttgataataaatcaaaatatggaaaactaaggtcgttagtagggaggagaacaaagaaggcatatcgtgatataaataacatttattatcatgatgacaccagaaaacgacgaagagcagacatctgtgttctccgctactgtttacggagacaaaattcagggaaagaataaacgcaaacgcgtgattggtctatgtattagaatatctatggttatttcactactatctatgattaccatgtccgcgtttctcatagtgcgcctaaatcaatgcatgtctgctaacgaggctgctattactgacgccgctgttgccgttgctgctgcatcatctactcatagaaaggttgcgtctagcactacgcaatatgatcacaaagaaagctgtaatggtttatattaccagggttcttgttatatattacattcagactaccagttattctcggatgctaaagcaaattgcactgcggaatcatcaacactacccaataaatccgatgtcttgattacctggctcattgattatgttgaggatacatggggatctgatggtaatccaattacaaaaactacatccgattatcaagattctgatatatcacaagaagttagaaagtatttttgtgttaaaacaatgaactaatatttatttttgtacattaataaatgaaatcgcttaatagacaaactgtaagtaggtttaagaagttgtcggtgccggccgctataatgatgatactctcaaccattattagtggcataggaacatttctgcattacaaagaagaactgatgcctagtgcttgcgccaatggatggatacaatacgataaacattgttatctagataccaacattaaaatgtctacagataatgcggtttatcagtgtcgtaaattacgagctagattgcctagacctgatactagacatctgagagtattgtttagtattttttataaagattattgggtaagtttaaaaaagaccaataataaatggttagatattaataatgataaagatatagatattagtaaattaacaaattttaaacaactaaacagtacgacggatgctgaagcgtgttatatatacaagtctggaaaactggttgaaacagtatgtaaaagtactcaatctgtactatgtgttaaaaaattctacaagtgacaacaaaaactgcagaaaaattgaaaaactagcgtctttttttgctcgactcgagaccatggaggaatccgtggttcggccatctgtatttgtagttgacggccaaacggacattccattcactcgcttgggacgatcacacaggcgacagagttgttcagtcgccagggtgggattgggcttgctgctgctgctcatgggcgccggcttggccgttcaaggttggtttcttcttcagcttcactggcgcttgggggagatggttacgcggttgcccgacgggccagctgggtcttgggaacaactgatccaggagaggagatcacatgaggtcaaccccgcagcgcacttgactggagccaattcttccctcacgggctcaggcggccccctgctctgggagacacagctgggactcgcttttctgcgaggactgtcttatcacgatggagcgctggtggtaaccaagacggggtactactatatctatagtaaggtacagcttggcggggtcggatgcccgctcgggttggcgggaacaatcacccacggtctgtacaagagaacacctcggtacccggaggaacttgaacttctggtgagccagcagagcccgtgtggtagagcaacatccagttccagagtatggtgggattcatcctttctcgggggtgtggtacatctggaggctggcgaaaaagtggtcgtgagagtgcttggaaagaggctcgtacgattgagagatggaactagatcatactttggggcgtttatggtgtgattaattaatttttatgagctcagacggcaatggatggatcataattgatgggaaatgcaatagtaattttttatcataaaagttgtaaagtaaataataaaacaataaatattgaactagtagtacgtatattgagcaatcagaaatgatgctggtacctcttatcacggtgaccgtagttgcgggaacaatattagtatgttatatattatatatttgtaggaaaaagatacgtactgtctataatgacaataaaattatcatgacaaaattaaaaaagataaagagttctaattccagcaaatctagtaaatcaactgatagcgaatcagactgggaggatcactgtagtgctatggaacaaaacaatgacgtagataatatttctaggaatgagatattggacgatgatagcttcgctggtagtttaatatgggataacgaatccaatgttatggcgcctagcacagaacacatttacgatagtgttgctggaagcacgctgctaataaataatgatcgtaatgaacagactatttatcagaacactacagtagtaattaatgaaacggagactgttaaagtacttaatgaagataccaaacagaatcctaactattcatccaatcctttcgtaaattataataaaaccagtatttgtagcaagtcaaatccgtttattacagaacttaacaataaatttagtgagaataatccgtttagacgagcacatagcgatgattatcttaataagcaagaacaagatcatgaacacgatgatatagaatcatcggtcgtatcattggtgtgattagtttcctttttataaaattgaagtaatatttagtattattgctgccgtcacgttgtacaaatggagatattccctgtattcggcatttctaaaattagcaattttattgctaataatgactgtagatattatatagatacagaacatcaaaaaattatatctgatgagatcaatagacagatggatgaaacggtacttcttaccaacatcttaagcgtagaagttgtaaatgacaatgagatgtaccatcttattcctcatagattatcgacgattatactctgtattagttctgtcggaggatgtgttatctctatagataatgacgtcaatggcaaaaatattctaacctttcccattgatcatgctgtaatcatatccccactgagtaaatgtgtcgtagttagcaagggccctacaaccatactggttgctaaagcggatatacccagcaaacgattggtaacatcgtttacaaacgacatactgtatgtaaacaatctatcactgattaattatttgccgttgtctgtattcattattagacgagtcaccgactatttggatagacacatatgcgatcagatatttgctaataataagtggtattcccttataaccatcgacgataagcaatatcctattccatcaaattgtataggtatgtcttctgccaagtacataaattctagcatcgagcaagatactttaatacatgtttgtaacctcgagcatccattcgacttagtatacaaaaaaatgcagtcgtacaattctgtacctatcaaggaacaaatattgtacggtagaattgataatataaatatgagcattagtatttctgtggattaatagatttctagtatggggatcattaatcatctctaatctctaaatacctcataaaacgaaaaaaaagctattatcaaatactgtacggaatagattcattctcttctctttttatgaaactctgttgtatatctactgataaaactggaagcaaaaaatctgataaaaagaataagatcaagatcaaggattatatggaacacgattattataaaataacaatagttcctggttcctcttccacgtctactagctcgtggtattatacacatgcctagtaatagtctctttgcgttgatggaaagcagactagaaataacaggctaaaatgttcagacaccataatagttcccaacccagataataacagagtaccatcaacacattcctttaaactcaatcccaaacccaaaaccgttaaaatgtatccggccaattgatagtagataatgaggtgtacagcgcatgataatttacacagtaaccaaaatgaaaatactttagtaattataagaaatatagatggtaacgtcatcatcaacaatccaataatatgccggagagtaaacattgacggataaaacaaaaatgctccgcataactctatcatggcaataacacaaccaaatacttgtaagattcctaaattagtagaaaatacaacggatatcgatgtataagtgatctcgagaaataataagaataaagtaatgcccgtaaagataaacatcaacattgtttggtaatcattaaaccaattagtatgacgttgaactaatttcacagtaaattttattccagtattatccccgcatgtataagtacctggtaagatatctttatattccataatcaatgagacatcactatctgataacgaatgaagtctagcactagtatgccatttacttaatattgtcgtcttggaagttttattataagttaaaatatcatggttatccaatttccatctaatatactttgtcggattatctatagtacacggaataatgatggtatcattacatgctgtatactctatggtctttgtagttgttataacaaccaacgtatagaggtatatcaacgatattctaactcttgacattttttatttatttaaaatgatacctttgttatttattttattctattttgctaacggtattgaatggcataagtttgaaacgagtgaagaaataatttctacttacttattagacgacgtattatacacgggtgttaatggggcggtatacacattttcaaataataaactaaacaaaactggtttaactaataataattatataacaacatctataaaagtagaggatgcggataaggatacattagtatgcggaaccaataacggaaatcccaaatgttggaaaatagacggttcagacgacccaaaacatagaggtagaggatacgctccttatcaaaatagcaaagtaacgataatcagtcacaacggatgtgtactatctgacataaacatatcaaaagaaggaattaaacgatggagaagatttgacggaccatgtggttatgatttattcacggcggataacgtaattccaaaagatggtttacgaggagcattcgtcgataaagacggtacttatgacaaagtttacattcttttcactgatactatcggctcaaagagaattgttaaaattccgtatatagcacaaatgtgcctaaacgacgaaggtggtccatcatcgttgtctagtcatagatggtcgacgtttctcaaagtcgaattagaatgtgatatcgacggaagaagttatagataaattattcattctaaaactataaaaacagataatgatacgatactatatgtattcttcgatagtccgcattatgtacctattctatgaataccattaaacaatctttttctacgtcaaaattggaaggatatacaaagcaattgccgtctccagctcctggtatatgtctaccagctggaaaagttgttccacataccacgtttgaagtcatagaaaaatataatgtactagatgatattataaagcctttatctaaccaacctatcttcgaaggaccgtctggtgttaaatggttcgatataaaggagaaggaaaatgaacatcgggaatatagaatatacttcataaaagaaaattctatatattcgttcgatacaaaatctaaacaaactcgtagctcgcaagtcgatgcgcgactattttcagtaatggtaacttcgaaaccgttatttatagcagatatagggataggagtaggaatgccacaaatgaaaaaaatacttaaaatgtaatcttaatcgagtacaccacacgacaatgaacaaacataagacagattatgctggttatgcttgctgcgtaatatgcggtctaattgttggaattatttttacagcgacactattaaaagttgtagaacgtaaattagttcatacaccatcaatagataaaacgataaaagatgcatatattagagaagattgtcctactgactggataagctataataataaatgtatccatttatctactgatcgaaaaaacctgggaggaaggacgtaatgcatgcaaagctctaaatccaaattcggatctaattaagatagagactccaaacgagttaagttttttaagaagccttagacgaggctattgggtaggagaatccgaaatattaaaccagacaaccccatataattttatagctaaaaatgccacgaagaatggaactaaaaaacggaaatatatttgtagtacaacgaatactcccaaactgcattcgtgttacactatataacaattacactacatttttatcataacactacttcggttagatgttttagaaaaaaataaatatcgccgtaccgttcttgtttttataaaaataacaattaacaattatcaaattttttctttaatattttacgtggttgaccattcttggtggtaaaataatctcttagtgttggaatggaatgctgtttaatgtttccgcactcatcgtatattttgacgtatgcagtcacatcgtttacgcaatagtcagactgtagttctatcatgcttcctacatcagaaggaggaacagttttaaagtctcttggttttaatctattgccattagttttcatgaaatcctttgttttatccacttcacattttaaataaatgtccactatacattcttctgttaattttactagatcgtcatgggtcatagaatttataggttccgtagtccatggatccaaactagcaaacttcgcgtatacggtatcgcgattagtgtatacaccaactgtatgaaaattaagaaaacagtttaataaatcaacagaaatatttaatcctccgtttgatacagatgcgccatatttatggatttcggattcacacgttgtttgtctgaggtgttcgtctagtgttgcttctacgtaaacttcgattcccatatattctttattgtcagaatcgcataccgatttatcatcatacactgtttgaaaactaaatggtatacacatcaaaataataaataataacgagtacattctgcaatattgttatcgtaattggaaaattagtgttcgagtgagtcggattatgtgagtactggattgtatattttattttatattttgtaataagaataaaatgctaatgtcaagtttattccaatagatgtcttattaaaaaacatatataataaataacaatggctgaatggcataaaattatcgaggatatctcaaaaaataataagttcgaggatgccgccatcgttgattacaagactacaaagaatgttctagctgctattcctaacagaacatttgccaagattaatccgggtgaaattattcctctcatcactaatcgtaatattctaaaacctcttattggtcagaaatattgtattgtatatactaactctctaatggatgagaacacgtatgctatggagttgcttactgggtacgcccctgtatctccgatcgttatagcgagaactcataccgcacttatatttttgatgggtaagccaacaacatccagacgtgatgtgtatagaacgtgtagagatcacgctacccgtgtacgcgcaactggtaattaaaataaaaagtaatattcatatgtagtgtcaattttaaatgatgatgatgaaatggataatatccatattgacgatgtcaataatgccggtattggcatacagctcatcgatttttagatttcattcagaggatgtggaattatgttatgggcatttgtattttgataggatctataatgtagtaaatataaaatataatccgcatattccatatagatataattttattaatcgcacgttaaccgtagatgaactagacgataatgtcttttttacacatggttattttttaaaacacaaatatggttcacttaatcctagtttgattgtctcattatcaggaaacttaaaatataatgatatacaatgctcagtaaatgtatcgtgtctcattaaaaatttggcaacgagtacatctactatattaacatctaaacataagacttattctctacatcggtccacgtgtattactataataggatacgattctattatatggtataaagatataaatgacaagtataatgacatctatgattttactgcaatatgtatgctaatagcgtctacattgatagtgaccatatacgtgtttaaaaaaataaaaatgaactcttaattatgctatgctattagaaatggataaaatcaaaattacggttgattcaaaaattggtaatgttgttaccatatcgtataacttggaaaagataactattgatgttacacctaaaaagaaaaaagaaaaggatgtattattagcgcaatcagttgctgtcgaagaggcaaaagatgtcaaggtagaagaaaaaaatattatcgatattgaagatgacgatgatatggatgtagaaagcgcataatacgatctataaaaataagtatataataaatactttttatttacggtactcttgtagtggtgataccctactcaattatttttttaaaaaaatacttattctgattcttctagccatttccgtgttcgttcgaatgccacatcgacgttaaagataggggagtagttgaaatctagttctgcattgttggtacgcacctcaaatgtagtgttggatatcttcaacgtatagttgttgagtagtgatggttttctaaatagaattctcttcatatcattcttgcacgcgtacatttttagcatccatcttggaattctagatccttgttctattcccaatggtttcatcaatagaagattaaacatatcgtacgaacacgatggagagtaatcgtagcaaaagtaagcatttcctttaatcttagatcccggatactggatatattttgcagccaacacgtgcatccatgcagcatttcctacatatacccggctatgcaccgcgtcatcatcgactgtacgatacataatgttaccgtgttgcttacattgctcgtaaaagactttcgtcaatttgtctccttctccgtaaattccagtgggtcttaggcaacaagtatacaattttgctccattcatgattacggaattattggctttcataaccagttgctcggccatacgtttactttttgcgtatacatgtcctggtgatatatcataaagggtatgctcatggccgatgaatggatcaccgtgtttattgggtcctattgcttccatgctactagtatagatcaaatacttgattcctaggtccacacaagctgccaatatagtctgtgttccataatagtttactttcatgatttcattatcggtgtattttccaaatacatccactagagcagccgtatgaataatcagatttaccccatctagcgcttctctcaccttatcaaagtcgtttatatcacattgtatatagtttataaccttaactttcgaggttattggttgtggatcttctacaatatctatgactctgatttcttgaacatcatctgcactaattaacagttttactatatacctgcctagaaatccggcaccaccagtaaccgcgtacacggccattgctgccactcataatatcagactacttattctattttactaaataatggctgtttgtataatagaccacgataatatcagaggagttatttactttgaaccagtccatggaaaagataaagttttaggatcagttattggattaaaatccggaacgtatagtttgataattcatcgttacggagatattagtcaaggatgtgattccataggcagtccagaaatatttatcggtaacatctttgtaaacagatatggtgtagcatatgtttatttagatacagatgtaaatatatttacaattattggaaaggcgttatctatttcaaaaaatgatcagagattagcgtgtggagttattggtatttcttacataaatgaaaagataatacattttcttacaattaacgagaatggcgtttgatatatcagttaatgcgtctaaaacaataaatgcattagtttacttttctactcagcaaaataaattagtcatacgtaatgaagttaatgatacacactacactgtcgaatttgatagggacaaagtagttgacacgtttatttcatataatagacataatgacaccatagagataagaggggtgcttccagaggaaactaatattggttgcgcggttaatacgccggttagtatgacttacttgtataataagtatagttttaaactgattttagcagaatatataagacacagaaatactatatccggcaatatttattcggcattgatgacactagatgatttggctattaaacagtatggagacattgatctattatttaatgagaaacttaaagtagactccgattcgggactatttgactttgtcaactttgtaaaggatatgatatgttgtgattctagaatagtagtagctctatctagtctagtatctaaacattgggaattgacaaataaaaagtataggtgtatggcattagccgaacatatatctgatagtattccaatatctgagctatctagactacgatacaatctatgtaagtatctacgcggacacactgagagcatagaggatgaatttgattattttgaagacgatgattcgtctacatgttctgccgtaaccgacagggaaacggatgtataattttttttatagcgtgaaggatatgataaaaaatataattgttgtatttatcccattccaatcaccttatatgattctgtaaaaaaattatactgtaacacaataaaggagtcttatagatgtatagaggtcagatactggtttgataaactgtttattccacataagtatgtttgactttatggttagacccgcatactttaacaaatcactgaaaattggagttaggtattgacctctcagaatcagttgccgttctggaacattaaatgtattttttatgatatactccaacgcatttatgtgggcatacaacaagtcattactaatggagtattccaagagttttagttgtctagtatttaacaagagaagagatttcaacagactgtttatgaactcgaacgccgcctcattgtcgcttatattgatgatgtcgaattctcccaatatcatcactgatgagtagctcatcttgttatcgggatccaagttttctaaagatgtcattaaaccctcgatcatgaatggatttatcatcatcgtttttatgttggacatgagcttagtccgtttgtccacatctatagacgacgatttctgaattatttcatatatccctctctttaactccaggaacttgtcaggatggtctactttaatatgttctcgtctaagagatgaaaatctttggatggttgcacgcgacttttctttaaaggatgacgttgcccaagatcctctcttaaatgaatccatcttatccttggacaagatggacagtctattttccttagatggtttaatatttttgttacccatgatctataaaggtagacctaatcgtctcggatgaccatatatttattttcagttttattatacgcataaattgtaaaaaatatgttaggtttacaaaaatgtctcgtggggcattaatcgtttttgaaggattggacaaatctggaaaaacaacacaatgtatgaacatcatggaatctataccggcaaacacgataaaatatcttaactttcctcagagatccactgtcactggaaagatgatagatgactatctaactcgtaaaaaaacctataatgatcatatagttaatctattattttgtgcaaatagatgggagtttgcatcttttatacaagaacaactagaacagggaattactttaatagttgatagatacgcattttctggagtagcgtatgccgccgctaaaggcgcgtcaatgactctcagtaagagttatgaatctggattgcctaaacccgacttagttatattcttggaatctggtagcaaagaaattaatagaaacgtcggcgaggaaatttatgaagatgttacattccaacaaaaggtattacaagaatataaaaaaatgattgaagaaggagatattcattggcaaattatttcttctgaattcgaggaagatgtaaagaaggagttgattaagaatatagttatagaggctatacacacggttactggaccagtggggcaactgtggatgtaatagtgaaattacattttttataaatagatgttagtacagtgttataaatggatgaagcatattactctggcaacttggaatcagtactcggatacgtgtccgatatgcataccgaactcgcatcaatatctcaattagttattgccaagatagaaactatagataatgatatattaaacaaggacattgtaaattttatcatgtgtagatcaaacttggataatccatttatctctttcctagatactgtatatactattatagatcaagagatctatcagaccgaattgattaattcattagacgacaatgaaattatcgattgtatagttaacaagtttatgagcttttataaggataacctagaaaatatagtagatgctatcattactctaaaatatataatgaataatccagattttaaaactacgtatgccgaagtactcggttccagaatagccgatatagatattaaacaagtgatacgtaagaatatactacaattgtctaatgatatccgcgaacgatatttgtgaaaaatattaaaaaaaaatactttttttattaaatgacgtcgcttcgcgaatttagaaaattatgctgtgatatatatcacgcatcaggatataaagaaaaatctaaattaattagagactttataacagatagggatgataaatatttgatcattaagctattgcttcccggattagacgatagaatttataacatgaacgataaacaaattataaaattatatagtataatatttaaacaatctcaggaagatatgctacaagatttaggatacggatatataggagacactattaggactttcttcaaagagaacacagaaatccgtccacgagataaaagcattttaactttagaagaagtggatagttttttaactacgttatcatccgtaactaaagaatcgcatcaaataaaattattgactgatgtagcatctgtttgtacatgtaatgatttaaaatgtgtagtcatgcttattgataaagatctaaaaattaaagcgggccctcggtacgtacttaacgctattagtcctcatgcctatgatgtgtttagaaaatctaataacttgaaagagataatagaaaatgcatctaaacaaaatctagactctatatctatttctgttatgactccaattaatcccatgttagcggaatcgtgtgattctgtcaataaggcgtttaaaaaatttccatcaggaatgtttgcggaagtcaaatacgatggtgaaagagtacaagttcataaaaataataacgagtttgccttctttagtagaaacatgaaaccagtactctctcataaagtggattatctcaaagaatacataccgaaagcatttaaaaaagctacgtctatcgtattggattctgaaattgttcttgtagacgaacataatgtaccgctaccgtttggaagtttaggaatacacaaaaagaaagaatataaaaactctaacatgtgtttgttcgtgtttgactgtttgtactttgatggattcgatatgacggacattccattgtacgaacgaagatcttttctcaaagatgttatggttgaaatacccaatagaatagtattctcagagttgacgaatattagtaacgagtctcagttaactgacgtattggatgatgcactaacgagaaaattagaaggattggtcttaaaagatattaatggagtatacgaaccgggaaagagaagatggttaaaaataaagcgagactatttgaacgagggttccatggcagattctgccgatttagtagtactaggtgcctactatggtaaaggagcaaagggtggtatcatggcagtctttctaatgggttgttacgacgatgaatccggtaaatggaagacggttaccaagtgttcaggacacgatgataatacgttaagggagttgcaagaccaattaaagatgattaaaattaacaaggatcccaaaaaaattccagagtggttagtagttaataaaatctatattcccgattttgtagtagaggatccgaaacaatctcagatatgggaaatttcaggagcagagtttacatcttccaagtcccataccgcaaatggaatatccattagatttcctagatttactaggataagagaggataaaacgtggaaagaatctactcatctaaacgatttagtaaacttgactaaatcttaatagttacatacaaactgaaaattaaaataacaccatttagttggtggtcgccatggatggtgttattgtatactgtctaaacgcgttagtaaaacatggcgaggaaataaatcatataaaaaatgatttcatgattaaaccatgttgtgaaagagtttgtgaaaaagtcaagaacgttcacattggcggacaatctaaaaacaatacagtgattgcagatttgccatatatggataatgcggtatccgatgtatgcaattcactgtataaaaagaatgtatcaagaatatccagatttgctaatttgataaagatagatgacgatgacaagactcctactggtgtatataattattttaaacctaaagatgttattcctgttatcatatctataggaaaggataaagatgtctgtgaactattaatctcatcagacatatcgtgtgcatgcgtggagttaaattcatatcacgtagccattcttcccatgaatgtttccttttttaccaaaggaaatgcctcgttgattattctcctgtttgatttctctatcgatgcagcacctctcttaagaagtgtaaccgataataatgttattatatctagacaccagcgtctacatgacgagcttccgagttccaattggttcaagttttacataagtataaagtccgactattgttctatattatatatggttgttgatggatctgtgatgcatgcgatagctgataatagaactcacgcaattattagcaaaaatatattagacaatactacaattaacgatgagtgtagatgctgttattttgaaccacagattaggattcttgatagagatgagatgctcaatggatcatcgtgtgatatgaacagacattgtattatgatgaatttacctgatgtaggcgaatttggatctagtatgttggggaaatatgaacctgacatgattaagattgctctttcggtggctggtaatttaataagaaatcgagactacattcccgggagacgaggctatagctactacgtttacggtatagcctctagataatttttttaagcacgaaataaaaaacataattttaaaccaatctatttcatactattttgtgtgatcaccatggacataaagatagatattagtatttctggtgataaatttacggtgactactaggagggaaaatgaagaaagaaaaaaatatctacctctccaaaaagaaaaaactactgatgttatcaaacctgattatcttgagtacgatgacttgttagatagagatgagatgtttactattctagaggaatattttatgtacagaggtctattaggcctcagaataaaatatggacgactctttaacgaaattaaaaaattcgacaatgatgcggaagaacaattcggtactatagaagaactcaagcagaaacttagattaaattctgaagagggagcagataactttatagattatataaaggtacaaaaacaggatatcgtcaaacttactgtatacgattgcatatctatgataggattgtgtgcatgcgtggtagatgtttggagaaatgagaaactgttttctagatggaaatattgtttacgagcgattaaactgtttattaatgatcacatgcttgataagataaaatctatactgcagaatagactagtatatgtggaaatgtcatagaaagttaatgagagcaaaaatatataaggttgtattccatatttgttattttttctgtaatagttaaaaaaatacattcgatggtctatctatcagattattatgtgttataaggtactttttctcataataaactagagtatgagtaagatagtgtttttcaaaacatataaatctaaaattgatggatgagatatacagctattaatttcgaaaatatataaatctaaaattgatggataagatatacagctattaatttcgaaaatatattttaatctgataactttaaacatggatttttgatggtggtttaacgttttaaaaaaagattttgttattgtagtatatgataatattaaaagatggatataaagaatttgctgactgcatgtactattttttacattactacattggctacggcagatatacctactccgccaccaacgggtcatgtgacaagggagaatatcttgataagaggcataatcaatgttgtaatcggtgtccacctggagaatttgccaaggttagatgtaatggtaacgataacacaaaatgtgaacgctgcccacctcatacatataccacaatccccaattattctaatggatgtcatcaatgtagaaaatgcccaaccggatcatttgataaggtaaagtgtaccggaacacagaacagtaaatgttcgtgtcttcctggttggtattgcgctactgattcttcacagactgaagattgttgaaattgtgtaccaaaaaggagatgtccatgcggatactttggtggaatagatgaacaaggaaatcctatttgtaaatcgtgctgtattggtgaatattgcaactacctacgtaattatagacttgatccattttctccatgcaaactatctaaatgtaattaattatgattttgatgataatgttaccatacattatatcgctacttggttagtgtattattcagtatgaagacctattaataattacttatcttttgacgatcttgttataattataatataaaaacttatggcatagtaactcataattgctgacgcgataaattcgtaataatctgttttgttcaaatttttataaggaatctacaggcataaaaataaaaatataatttataatatactcttacagcgcgccatcatgaatagcagcagtaaattaattgctgttattaatggatttagaaatagtggacgattttgtgatattaatatagttattaatgatgaaaggataaacgctcacagactcatcctatctggagcctccgaatatttttccattctgttttccaataattttatcgattctaatgaatacgaagttaatctaagtcatttagattatcaaagtgttaacgatttgatcgattacatttatgggatacctttgagcctaactaacgataacgtgaaatatattctttcaaccgctgattttttacaaattggatctgccattactgagtgcgaaaaatacatacttaaaaatctttgttctagaaactgtatcgatttctacatatacgctgataaatataataacaagaaaatagaatcagcgtcgtttaacacaatattacgaaatattttgagactcatcaacgatgaaaactttaaatacttaacagaggaatcaatgataaaaattttaagcgatgatatgttaaatataaaaaatgaggattttgcaccactaattctcattaaatggttagagagtactcaacaatcatgcaccgtcgagttacttagatgcctcagaatatcattgctttccccacaagttataaaatcactttatagtcatcaactggttagttcaatctacgaatgtataacattcttaaacaatatagcattcttggatgaatcatttcctagataccatagcatcgagttgatatctatcggtataagtaattcgcatgataagatttccataaactgctacaatcataaaaaaaatacatgggaaatgatatcttcacgtagatataggtgtagtttcgcagtggccgtcctggataatattatctatatgatgggtggatatgatcagtccccgtatagaagttcaaaggttatagcgtacaatacatgtacaaattcttggatatatgatataccagagctaaaatatcctcgttctaattgtgggggactggctgatgacgaatacatttattgtataggcggcatacgcgatcaggattcatcgttgacatctagtattgatagatggaagccatcaaaaccatattggcagaagtatgctaaaatgcgcgaaccaaaatgtgatatgggggttgcgatgttaaacggattaatatatgtcatgggtggaatcgttaaaggtgacacgtgtaccgacgcactagagagtttatcagaagatggatggatgaagcatcaacgtcttccaataaaaatgtccaatatgtcgacgattgttcatgatggcaagatttatatatctggaggttacaacaatagtagtgtagttaatgtaatatcgaatctagtccttagctataatccgatatatgatgaatggaccaaattatcatcattaaacattcctagaattaatcccgctctatggtcagcgcataataaattatatgtaggaggaggaatatctgatgatgttcgaactaatacatctgaaacatacgataaagaaaaagattgttggacattggataatggtcacgtgttaccacgcaattatataatgtataaatgcgaaccgattaaacataaatatccattggaaaaaacacagtacacgaatgattttctaaagtatttggaaagttttataggtagttgatagaacaaaatacataattttgtaaaaataaatcactttttatactaatatgacacgattaccaatacttttgttactaatatcattagtatacgctacaccttttcctcagacatctaaaaaaataggtgatgatgcaactctatcatgtaatcgaaataatacaaatgactacgttgttatgagtgcttggtataaggagcccaattccattattcttttagctgctaaaagcgacgtcttgtattttgataattataccaaggataaaatatcttacgactctccatacgatgatctagttacaactatcacaattaaatcattgactgctagagatgccggtacttatgtatgtgcattctttatgacatcaactacaaatgacactgataaagtagattatgaagaatactccacagagttgattgtaaatacagatagtgaatcgactatagacataatactatctggatctacacattcaccagaaactagttctgagaaaccagaggatatagataattttaattgctcgtcggtattcgaaatcgcgactccggaaccaattactgataatgtagaagatcatacagacaccgtcacatacactagtgatagcattaatacagtaagtgcatcatctggagaatccacaacagacgagactccggaaccaattactgataaagaagaagatcatacagtcacagacactgtctcatacactacagtaagtacatcatctggaattgtcactactaaatcaaccaccgatgatgcggatctttatgatacgtacaatgataatgatacagtaccaccaactactgtaggcggtagtacaacctctattagcaattataaaaccaaggactttgtagaaatatttggtattaccgcattaattatattgtcggccgtggcaatattctgtattacatattatatatataataaacgttcacgtaaatacaaaacagagaacaaagtctagatttttgacttacataaatgtctgggatagtaaaatctatcatattgagcggaccatctggttcaggaaagacagccatagccaaaagactatgggaatatatttggatttgtggtgtcccataccactagatttcctcgtcctatggaacgagaaggtgtcgattaccattacgttaacagagaggccatctggaagggaatagccgccggaaactttctagaacatactgagtttttaggaaatatttacggaacttctaaaactgctgtgaatacagcggctattaataatcgtatttgtgtgatggatctaaacatcgatggcgttagaagtcttaaaaatacgtacctaatgccttactcggtgtatataagacctacctctcttaaaatggttgagaccaagcttcgttgtagaaacactgaagcggatgatgagattcatcgtcgtgtgatgttggcaaaaactgacatggatgaggcaggtgaagccggtctattcgacactattatcattgaagatgatgtgaatttagcatatagtaagttaattcagatactacaggaccgtattagaatgtattttaacactaattagagacttaagacttaaaacttgataattaataatataactcgtttttatatgtggctatttcaacgtctaatgtattagttaaatattaaaacttaccacgtaaaacttaaaatttaaaatgatatttcattgacagatagatcacacattatgaactttcaaggacttgtgttaactgacaattgcaaaaatcaatgggtcgttggaccattaataggaaaaggtggattcggtagtatttatactactaatgacaataattatgtagtaaaaatagagcccaaagctaacggatcattatttaccgaacaggcattttatactagagtacttaaaccatccgttatcgaagaatggaaaaaatctcacaatataaagcacgtaggtcttatcacgtgcaaggcatttggtctatacaaatccattaatgtggaatatcgattcttggtaattaatagattaggtgcagatctagatgcggtgatcagagccaataataatagattaccaaaaaggtcggtgatgttgatcggaatcgaaatcttaaataccatacaatttatgcacgagcaaggatattctcacggagatattaaagcgagtaatatagtcttggatcaaatagataagaataaattatatctagtggattacggattggtttctaaattcatgtctaatggcgaacatgttccatttataagaaatccaaataaaatggataacggtactctagaatttacacctatagattcgcataaaggatacgttgtatctagacgtggagatctagaaacacttggatattgtatgattagatggttgggaggtatcttgccatggactaagatatctgaaacaaagaattgtgcattagtaagtgccacaaaacagaaatatgttaacaatactgcgactttgttaatgaccagtttgcaatatgcacctagagaattgctgcaatatattaccatggtaaactctttgacatattttgaggaacccaattacgacgagtttcggcacatattaatgcagggtgtatattattaagtgtggtgtttggtcgatgtaaaatttttgtcgataaaaattaaaaaataacttaatttattattgatctcgtgtgtacaaccgaaatcatggcgatgttttacgcacacgctctcggtgggtacgacgagaatcttcatgcctttcctggtaccaaaaattgaaaaactagcgtctttttttgctcgactgcagaccatggagacacccaagcctaggatactgccctggctcgtgagccagctcgatctcggccaactcgaaggtgtcgcttggttggacgagtcaaggacaagattcagaataccctggaagcatggcctgagacaggatgctcagatggccgattttggtatttttcaagcttgggccgaagcttctggtgcttacacccccggcaaggataaacctgatgtgtccacttggaaacggaatttccggtctgccttgaaccggaaggaagtgttgcgcctcgccgcagataactctaaagatccttacgaccctcacaaagtttatgagtttgttactcccggggcaagagattttgtgcatcttggggcttcacccgatactaatggaaaaagtagtcttccccacagtcaggagaatcttcccaaactttttgatgggcttattctcgggcccttgaaggatgaggggagttccgatttggcaatagtctctgacccaagccagcaactgccatcaccaaacgtcaacaattttctcaatccagccccccaagagaacccccttaaacagcttcttgccgaggagcaatgggagttcgaagttactgccttctatcgcgggaggcaggtattccaacaaaccttgttttgtccaggaggcttgagactcgtgggcagcactgctgatatgactctgccctggcagccagtgaccctccccgaccctgaagggttcctgactgacaaactcgtgaaggagtacgtgggacaagtactgaagggcctgggaaatggtcttgccctctggcaagctggacagtgcttgtgggctcaacgccttggacattcacacgcattttgggccctcggggaggagcttcttcctgacagtggccgcggaccagatggcgaggtacataaggataaagatggtgcagtcttcgacctcagaccatttgtcgcagaccttatcgccttcatggaaggttccggtcacagccctagatatacactttggttctgtatgggggaaatgtggccacaagatcaaccttgggtcaagcgccttgttatggtaaaggtggtccctacatgtttgaaagagctgctcgaaatggctcgggaaggaggagcctcttctttgaaaactgtagacctgcacatatctaacagccaaccaatcagcctgacctccgatcagtacaaagcttaccttcaagaccttgtcgaggacatggacttccaagccacaggcaacatttgattaattaatttttatgagctcctggtaaaagttaaacttggggagaatgatacagaaaatctttcttctactatatcggcggcaccatcgaggtaaccacctctcaagaagaccgcgtgaataatgtactcatgaaacgtttggaaactatacgccatatgtggtctgttgtatatgatcattttgatattgtgaatggtaaagaatgctgttatgtgcatacgcattcatctaatcaaaatcctataccgagtactgtaaaaacaaatttgtacatgaagactatgggatcatgcattcaaatggattccatggaagctctagagtatcttagcgaactgaaggaatcaggtggatggagtcccagaccagaaatgcaggaatttgaatatccagatggagtggaagacactgaatcaattgagagattggtagaggagttcttcaatagatcagaacttcaggctggtaaattagtcaaatttggtaattctattaattgttaaacatacatctgtttcagctaagcaactaagaacacgtatacggcagcagcttccttttatactctcatcttttaccaacacaaagggtggatatttgttcattggagttgataataatacacacaaagtatttggattcacggtgggttacgactacctcagactgatagagaatgatatagaaaagcatatcaaaagactttgtgttgtgcatttctgtgagaagaaagaggacatcaagtacacgtgtcgattcatcaaggtatataaacctggggatgaggctacctcgacatacgtgtgcgctatcaaagtggaaagatgctgttgtgctgtgtttgcagattggccagaatcatggtatatggatactaatggtatcaagaagtattctccagatgaatgggtgtcacatataaaattttaattaatgtaactatagagaacaaataataggttgtaatatcatatagacaataactaacaattaattagtaactgttatctcttttttaactaaccaactaactatatacctattaatacatcgtaattatagttcttaacatctattaatcattgattcgcttctttaattttttataaactaacattgttaattgaaaagggataacatgttacagaatataaattatatatggatttttttaaaaaggaaatacttgactggagtgtatatttatctcttcattatatagcacgcgtgtgttccaattcttccacatcccatataatacaggattataatctcgttcgaacatacgagaaagtggataaaacaatagttgattttttatctaggttgccaaatttattccatattttagaatatggggaaaatattctacatatttattctatggatgatgctaatacgaatattataattttttttctagatagagtattaaatattaataagaacgggtcatttatacacaatctcaggttatcatcatccattaatataaaagaatatgtatatcaattagttaataatgatcatccagataataggataagactaatgcttgaaaatggacgtagaacaagacattttttgtcctatatatcagatacagttaatatctatatatgtattttaataaatcatggattttatatagatgcagaagacagttacggttgtacattattacatagatgtatatatcactataagaaatcagaatcagaatcatacaatgaattaattaagatattgttaaataatggatccgatgtagataaaaaagatacgtacggaaacacaccttttatcctattatgtaaacacgatatcaacaacgtggaattgtttgagatatgtttagagaatgctaatatagactctgtagactttaatagatatacacctcttcattatgtctcatgtcgtaataaatatgattttgtaaagttattaatttctaaaggagcaaatgttaatgcgcgtaataaattcggaactactccattttattgtggaattatacacggtatctcgcttataaaactatatttggaatcagacacagagttagaaatagataatgaacatatagttcgtcatttaataatttttgatgctgttgaatctttagattatctattatccagaggagttattgatattaactatcgtactatatacaacgaaacatctatttacgacgctgtcagttataatgcgtataatacgttggtctatctattaaacagaaatggtgattttgagacgattactactagtggatgtacatgtatttcggaagcagtcgcaaacaacaacaaaataataatggaagtactattgtctaaacgaccatctttgaaaattatgatacagtctatgatagcaattactaaaaataaacaacataatgcagatttattgaaaatgtgtataaaatatactgcgtgtatgaccgattatgatactcttatagatgtacagtcgctacagcaatataaatggtatattttaaaatgtttcgatgaaatagatatcatgaagagatgttatataaaaaataaaactgtattccaattagttttttgtatcaaagacattaatactttaatgagatatggtaaacatccttctttcgtgaagtgcactagtctcgacgtatacggaagtcgtgtacgtaatatcatagcatctattagatatcgtcagagattaattagtctattatccaagaagctggatgcgggagataaatggtcgtgttttcctaacgaaataaaatataaaatattggaaaactttaacgataacgaactatccacatatctaaaaatcttataaacactattaaaatataaaatctaagtaggataaaatcacactacatcattgtttccttttagtgctcgacagtgtatactatttttaacactcataaataaaaatgaaaacgatttccgttgttacgttgttatgcgtactacctgctgttgtttattcaacatgtactgtacccactatgaataacgctaaattaacgtctaccgaaacatcgtttaatgataaacagaaagttacatttacatgtgatcagggatatcattctttggatccaaatgctgtctgcgaaacagataaatggaaatacgaaaatccatgcaagaaaatgtgcacagtttctgattatgtctctgaattatatgataagccattatacgaagtgaattccaccatgacactaagttgcaacggcgaaacaaaatattttcgttgcgaagaaaaaaatggaaatacttcttggaatgatactgttacgtgtcctaatgcggaatgtcaacctcttcaattagaacacggatcgtgtcaaccagttaaagaaaaatactcatttggggaatatatgactatcaactgtgatgttggatatgaggttattggtgcttcgtacataagttgtacagctaattcttggaatgttattccatcatgtcaacaaaaatgtgatataccgtctctatctaatggattaatttccggatctacattttctatcggtggcgttatacatcttagttgtaaaagtggttttatactaacgggatctccatcatccacatgtatcgacggtaaatggaatcccatactcccaacatgtgtacgatctaacgaaaaatttgatccagtggatgatggtcccgacgatgagacagatttgagcaaactctcgaaagacgttgtacaatatgaacaagaaatagaatcgttagaagcaacttatcatataatcatagtggcgttaacaattatgggcgtcatatttttaatctccgttatagtattagtttgttcctgtgacaaaaataatgaccaatataagttccataaattgctaccgtaaatataaatccgttaaaataattaataatttaataacaaacaagtatcaaaagattaaagacttatagctagaatcaattgagatgtcttcttcagtggatgttgatatctacgatgccgttagagcatttttactcaggcactattataacaagagatttattgtgtatggaagaagtaacgccatattacataatatatacaggctatttacaagatgcgccgttataccgttcgatgatatagtacgtactatgccaaatgaatcacgtgttaaacaatgggtgatggatacacttaatggtataatgatgaatgaacgcgatgtttctgtaagcgttggcaccggaatactattcatggaaatgtttttcgattacaataaaaatagtatcaacaatcaactaatgtatgatataattaatagcgtatctataattctagctaatgagagatatagaagcgcttttaacgacgatggtatatacatccgtagaaatatgattaacaagttgtacggatacgcatctctaactactattggcacgatcgctggaggtgtttgttattatctgttgatgcatctagttagtttgtataaataattatttcaatatactagttaaaattttaagattttaaatgtataaaaaactaataacgtttttatttgtaataggtgcattagcatcctattcgaataatgagtacactccgtttaataaactgagtgtaaaactctatatagatggagtagataatatagaaaattcatatactgatgataataatgaattggtgttaaattttaaagagtacacaatttctattattacagagtcatgcgacgtcggatttgattccatagatatagatgttataaacgactataaaattattgatatgtataccattgactcgtctactattcaacgcagaggtcacacgtgtagaatatctaccaaattatcatgccattatgataagtacccttatattcacaaatatgatggtgatgagcaacaatattctattactgcagagggaaaatgctataaaggaataaaatatgaaataagtatgatcaacgatgatactctattgagaaaacatactcttaaaattggatctacttatatatttgatcgtcatggacatagtaatacatattattcaaaatatgatttttaaaaatttaaaatatattatcacttcagtgacagtagtcaaataacaaacaacaccatgagatatattataattctcgcagttttgttcattaatagtatacacgctaaaataactagttataagtttgaatccgtcaattttgattccaaaattgaatggactggggatggtctatacaatatatcccttaaaaattatggcatcaagacgtggcaaacaatgtatacaaatgtaccagaaggaacatacgacatatccgcatttccaaagaatgatttcgtatctttctgggttaaatttgaacaaggcgattataaagtggaagagtattgtacgggactatgcgtcgaagtaaaaattggaccaccgactgtaacattgactgaatacgacgaccatatcaatttgtacatcgagcatccgtatgctactagaggtagcaaaaagattcctatttacaaacgcggtgacatgtgtgatatctacttgttgtatacggctaacttcacattcggagattctaaagaaccagtaccatatgatatcgatgactacgattgcacgtctacaggttgcagcatagactttgtcacaacagaaaaagtgtgcgtgacagcacagggagccacagaagggtttctcgaaaaaattactccatggagttcgaaagtatgtctgacacctaaaaagagtgtatatacatgcgcaattagatccaaagaagatgttcccaatttcaaggacaaaatggccagagttatcaagagaaaatttaataaacagtctcaatcttatttaactaaatttctcggtagcacatcaaatgatgttaccacttttcttagcatgcttaacttgactaaatattcataactaatttttattaatgatacaaaaacgaaataaaactgcatattatacactggttaacgcccttataggctctaaccattttcaagatgaggtccctgattatagtccttctgttcccctctatcatctactccatgtctattagacgatgtgagaagactgaagaggaaacatggggattgaaaatagggttgtgtataattgccaaagatttctatcccgaaagaactgattgcagtgttcatctcccaactgcaagtgaaggattgataactgaaggcaatggattcagggatatacgaaacaccgataaattataaaaaaagcaatgtgtccgctgtttccgttaataatactattttcgtaactggcggattattcataaataactctaatagcacgatcgtggttaacaatatggaaaaacttgacatttataaagacaaacaatggtcgattatagaaatgcctatggctagggtatatcacggcatcgactcgacatttggaatgttatattttgccggaggtctatccgttaccgaacaatatggtaatttagagaaaaacaacgagatatcttgttacaatcctagaacgaataagtggtttgatatttcatatactatttataagatatccatatcatcattgtgtaaactaaataacgtcttctatgtatttagtaaggacattggatatgtggaaaagtatgatggtgcatggaagttagtacatgatcgtctccccgctataaaggcattatcaacttctccttattgattgaaaatgaaaatataaatagtttttatgtatagcagtattaccctatagttttattgcttactactaacatggatacagatgttacaaatgtagaagatatcataaatgaaatagatagagagaaagaagaaatactaaaaaatgtagaaattgaaaataataaaaacattaacaagaatcatccaagtggatatattagagaagcactcgttattaatacaagtagtaatagtgattccattgataaagaagttatagaatgtatcagtcacgatgtaggaatatagatcatatctactaatttttataatcgatacaaaacataaaaaacaactcgttattacatagcaggcatggaatccttcaagtattgttttgataacgatggcaagaaatggattatcggaaatactttatattctggtaattcaatactatataaggtcagaaaaaatttcactagttcgttctacaattacgtaatgaaaatagatcacaaatcacacaagccattgttgtctgaaatacgattctatatatctgtattggatcctttgactatcgacaactggacacgggaacgtggtataaagtatttggctattccagatctgtatggaattggagaaaccgatgattatatgttcttcgttataaagaattcgggaagagtattcgccccaaaggatactgaatcagtcttcgaagcatgcgtcactatgataaacacgttagagtttatacactctcgaggatttacccatggaaaaatagaaccgaggaatatactgattagaaataaacgtctttcactaattgactattctagaactaacaaactatacaagagtggaaactcacatatagattacaacgaggacatgataacttcaggaaatatcaattatatgtgtgtagacaatcatcttggagcaacagtttcaaaacgaggagatttagaaatgttgggatattgcatgatagaatggttcggtggcaaacttccatggaaaaacgaaagtagtataaaagtaataaaacaaaaaaaagaatataaaaaatttatagctactttctttgaggactgttttcctgaaggaaatgaacctctggaattagttagatatatagaattagtatacacgttagattattctcaaactcctaattatgacagactacgtaaactgtttatacaagattgaaattatattctttttttatagagtgtggtagtgttacggatatctaatattaatattagactatctctatcgcgctacacgaccaatatcgattactatggatatcttcagggaaatcgcatcttctatgaaaggagagaatgtattcatttctccagcgtcaatctcgtcagtattgacaatactgtattatggagctaatggatccactgctgaacagctatcaaaatatgtagaaacggaggagaacacggataaggttagcgctcagaatatctcattcaaatccatgaataaagtatatgggcgatattctgccgtgtttaaagattcctttttgagaaaaattggcgataagtttcaaactgttgacttcactgattgtcgcactatagatgcaatcaacaagtgtgtagatatctttactgaggggaaaatcaatccactattggatgaaccattgtctcctgatacctgtctcctagcaattagtgccgtatactttaaagcaaaatggttgatgccattcgaaaaggaatttaccagtgattatcccttttacgtatctccgacggaaatggtagatgtaagtatgatgtctatgtacggcaaggcatttaatcacgcatctgtaaaggaatcattcggcaacttttcaatcatagaactgccatatgttggagatactagtatgatggtcattcttccagacaagattgatggattagaatccatagaacaaaatctaacagatacaaattttaagaaatggtgtaactctctggaagctacgtttatcgatgttcacattcccaagtttaaggtaacaggttcgtataatcttgtggatactctagtaaagtcaggactgacagaggtgttcggttcaactggagattatagcaatatgtgtaattcagatgtgagtgtcgacgctatgattcacaaaacgtatatagatgtcaatgaagagtatacagaagcagctgcagcaacttgtgcactggtgtcagactgtgcatcaacaattacaaatgagttctgtgtagatcatccgttcatctatgtgattaggcatgttgatggaaaaattcttttcgttggtagatattgctctccgacaactaattgttaaccattttttttaaaaaaatagaaaaaacatgtggtattagtgcaggtcgttgttcttccaattgcaattggtaagatgacggccaactttagtacccacgtcttttcaccacagcactgtggatgtgacagactgaccagtattgatgacgtcagacaatgtttgactgaatatatttattggtcgtcctatgcataccgcaacaggcaatgcgctggacagttgtattccacactcctctcttttagagatgatgcggaatcagtgttcatcgacattcgcgagctggtaaaaaatatgccgtgggatgatgtcaaagattgtacagaaatcatccgttgttatataccggatgagcaaaaaaccatcagagagatttcggccatcatcggactttgtgcatatgctgctacttactggggaggtgaagaccatcccactagtaacagtctgaacgcattgtttgtgatgcttgagatgctcaattacgtggattataacatcatattccggcgtatgaattgatgagttgtacatcttgacattttctttcttctcttctccctttcttctcttctcccttcctccctcttctccctttcccagaaacaaacttttttacccactataaaataaaatgagtatactacctattatatttcttcctatatttttttattcttcattcgttcagacttttaacgcgcctgaatgtatcgacaaagggcaatattttgcatcattcatggagttagaaaacgagccagtaatcttaccatgtcctcaaataaatacgctatcatccggatataatatattagatattttatgggaaaaacgaggagcggataatgatagaattataccgatagataatggtagcaatatgctaattctgaacccgacacaatcagactctggtatttatatatgcattaccacgaacgaaacctactgtgacatgatgtcgttaaatttgacaatcgtgtctgtctcagaatcaaatatagatcttatctcgtatccacaaatagtaaatgagagatctactggcgaaatggtatgtcccaatattaatgcatttattgctagtaacgtaaacgcagatattatatggagcggacatcgacgccttagaaataagagacttaaacaacggacacctggaattattaccatagaagatgttagaaaaaatgatgctggttattatacatgtgttttagaatatatatacagaggtaaaacatataacgtaaccagaattgtaaaattagaggtacgggataaaataataccttctactatgcaattaccagatggcattgtaacttcaataggtagtaatttgactattgcgtgtagagtatcgttgagacctcccacaacggatgcagacgtcttttggataagtaatggtatgtattacgaagaagatgatggggacggagacggtagaataagtgtagcaaataaaatctatatgaccgataagagacgtgttattacatcccggttaaacattaatcctgtcaaggaagaagatgctacaacgtttacgtgtatggcgtttactattcctagcatcagcaaaacagttactgttagtataacgtgaatgtatgttgttacatttccatgtcaattgagtttataagaatttttatacattatcttccaacaaacaattgacgaacgtattgctatgattaactcccacgatactatgcatattattaatcattaacttgcagactatacctagtgctattttgacatactcatgttcttgtgtaattgcggtatctatattattaaagtacgtaaatctagctatagttttattatttaattttagataatataccgtctccttatttttaaaaattgccacatcctttattaaatcatgaatgggaatttctatgtcatcgttagtatattgtgaacaacaagagcagatatctataggaaagggtggaatgcgatacattgatctatgtagttttaaaacacacgcgaactttgaagaatttatataaatcattccatcgatacatccttctatgttgacatgtatatatccaggaattcttttattaatgtcaggaaatgtataaactaaaacattgcccgaaagcggtgcctctatctgcgttatatccgttcttaacttacaaaatgtaaccaatacctttgcatgacttgttttgttcggcaacgttagtttaaacttgacgaatggattaattacaatagcatgatccgcgcatctattaagtttttttactttaacgcccttgtatgtttttacagagactttatctaaatttctagtacttgtatgtgttataaatataacgggatatagaactgaatcacctaccttagatacccaattacattttatcagatccagataataaacaaattttgtcgccctaactaattctatattgttatatattttacaattggttatgatatcatgtaataacttggagtctaacgcgcatcgtcgtacgtttatacaattgtgatttagtgtagtatatctacacatgtatttttccgcactatagtattctggactagtgataaaactatcgttatatctgtcttcaatgaactcatcgagatattgctctctgtcatattcatacacctgcataaactttctagacatcttacaatccgtgttattttaggatcatatttacatatttacgggtatatcaaagatgttagattagttaatgggaatcgtctataataatgaatattaaacaattatatgaggacttttaccacaaagcatcataaaaatgagtcgtcgtctgatttatgttttaaatatcaaccgcaaatcaactcataaaatacaagagaatgaaatatatacatattttagtcattgcaatatagaccatacttctacagaacttgattttgtagttaaaaactatgatctaaacagacgacaacatgtaactgggtatactgcactacactgctatttgtataataattactttacaaacgatgtactgaagatattattaaatcatgacgtaaatgtaacgatgaaaaccagtagcggacgtatgcctgtttatatattgcttactagatgttgcaatatttcacatgatgtagtgatagatatgatagacaaagataaaaaccacttattacatagagactattccaacctattactagagtatataaaatctcgttacatgttattaaaggaagaggatatcgatgagaacatagtatccactttattagataagggaatcgatcctaactttaaacaagacggatatacagcgttacattattattatttgtgtctcgcacacgtttataaaccaggtgagtgtagaaaaccgataacgataaaaaaggccaagcgaattatttctttgtttatacaacatggagctaatctaaacgcgttagataattgtggtaatacaccattccatttgtatcttagtattgaaatgtgtaataatattcatatgactaaaatgctgttgacttttaatccgaatttcaaaatatgtaataatcatggattaacgcctatactatgttatataacttccgactacatacaacacgatattcttgttatgttaatacatcactatgaaacaaatgttggagaaatgccgatagatgagcgtcgtatgatcgtattcgagtttatcaaaacatattctacacgtccggcagattcgataacttatttgatgaataggtttaaaaatataaatatttatacccgctatgaaggaaagacattattacacgtagcatgtgaatataataatacacacgtaatagattatcttatacgtatcaacggagatataaatgcgttaaccgacaataacaaacacgctacacaactcattatagataacaaagaaaattccccgtataccatcgattgtttactgtatatacttagatatattgtagataagaatgtgataagatcgttggtggatcaacttccatctctacctatcttcgatataaaatcatttgagaaattcatatcctactgtatacttttagatgacacattttacgataggcacgttaagaatcgcgattctaaaacgtatcgatacgcattttcaaaatacatgtcgtttgataaatacgatggtataataactaaatgtcacgacgaaacaatgttactcaaactgtccactgttctagacactacactatatgcagttttaagatgccataattcgaaaaagttaagaagatacctcaacgagttaaaaaaatataataacgataagtcctttaaaatatattctaatattatgaatgagagataccttaatgtatattataaagatatgtacgtgtcaaaggtatatgataaactatttcctgttttcacagataaaaattgtctactaacattactaccttcagaaattatatacgaaatattatacatgctgacaattaacgatctttataatatatcgtatccacctaccaaagtatagttgtatttttctcatgcgatgtgtgtaaaaaaactgatattatataaatattttagtgccgtataataaagatgacgatgaaaatgatggtacatatatatttcgtatcattattgttattgctattccacagttacgccatagacatcgaaaatgaaatcacagaattcttcaataaaatgagagatactctaccagctaaagactctaaatggttgaatccagcatgtatgttcggaggcacaatgaatgatatagccgctctaggagagccattcagcgcaaagtgtcctcctattgaagacagtcttttatcgcacagatataaagactatgtggttaaatgggagaggctagaaaagaatagacggcgacaggtttctaataaacgtgttaaacatggtgatttatggatagccaactatacatctaaattcagtaaccgtaggtatttgtgtaccgtaactacaaagaatggtgactgtgttcagggtatagttagatctcatattaaaaaacctccttcatgcattccaaaaacatatgaactaggtactcatgataagtatggcatagacttatactgtggaattctttacgcaaaacattataataatataacttggtataaagataataaggaaattaatatcgacgacattaagtattcacaaacgggaaagaaattaattattcataatccagagttagaagatagtggaagatacaactgttacgttcattacgacgacgttagaatcaagaatgatatcgtagtatcaagatgtaaaatacttacggttataccgtcgcaagaccacaggtttaaactaatactagatccaaaaatcaacgtaacgataggagaacctgccaatataacatgcactgctgtgtcaacgtcattattgattgacgatgtactgattgaatgggaaaatccatccggatggcttataggattcgattttgatgtatactctgttttaactagtagaggcggtattaccgaggcgaccttgtactttgaaaatgttactgaagaatatataggtaatacatataaatgtcgtggacacaactattattttgaaaaaacccttacaactacagtagtattggagtaaatacacaatgcatttttatatacattactgaataattattattattatttatatcgtatttgtgctataacgcgactatctaggtatttgtatctcactgatagagaacatataaatatagactctattaaacagttgtgtaaaatatcaaatcctaatagatgtggatgtacggctttacatgagtacttttataattatagatcagtcaacggaaaatacaagtatagatacaacggttactatcaatattatttatctagcgattatgaaaattataatgaatattattatgatgattatgatagaactggtatgaacagtgagagtgataatatatcaatcaaaacagaatatgaattctatgatgaaacacaagatcaaagtacacaactagtaggttacgacattaaactcaaaaccaatgaggatgattttatggctatgatagatcagtgggtgtccatgattatatagatgaatcaattaataaagtagtatatggaagagagtctcacgtaagatggcgggatatatggcaagaacataatgatggcgtatacagtataggaaaggagtgcatagataatatatacgaagacaaccataccgtagacgaattctacaagatagacagcgtatcagatgtagatgacgcggaacacatatctccgataactaatgatgtatctacacaaacatgggaaaagaaatcagagttagatagatacatggaaatgtatcctcgtcatagatatagtaagcattctgtctttaagggattttctgacaaagttagaaaaaatgatttagacatgaatgtggtaaaagaattactttctaacggtgcatctctaacaattaaggatagcagtaataaggatccaataaccgtttattttcgaagaacgataatgaatttagaaatgattgatattattaacaaacatacaactattgatgaacgaaagtatatagtacactcctatctaaaaaattataaaaatttcgattatccatttttcaggaagttagttttgactaataaacattgtctcaacaattattataatataagcgacagcaaatatggaacaccgctacatatattggcgtctaataaaaaattaataactcctaattacatgaagttattagtgtataacggaaatgatataaacgcacgaggtgaagatacacaaatgcgaactccattacacaaatatttgtgtaaatttgtatatcataatattgaatatggtatccgatactataatgaaaagattatagacgcatttatagagttaggagccgatctaactattccaaataacgatggaatgataccagtagtttactgtatacactcaaatgcagaatatggttataacaatattactaacataaagataatacgtaaactacttaatcttagtagacgtgcgtcacataatctatttagagatcgagtcatgcacgattatataagtaatacatatattgatcttgagtgtttagatattattagatcgttggatggattcgatatcaatggttactttgaaggacgtacaccacttcattgcgctatacaacataacttcactcagattgctaagtacttattagatcgaggagctgatatagtcgtacccaacacattgattatacatcagtacatacagtaaatagcatagatatggaggaggatacaaatatttcaaataaagttataaggtacaacactgtcaataatatatggaagacattacctaacttctggactggaactataaatccaggcgtggtctcgcataaagatgatatatatgttgtatgcgacatcaaagatgaaaaaaatgttaagacttgtatatttagatataacacgaatacgtataacggatgggaattggttacgacgacagaaagcagattatcagctctgcatactattcttcatgacaataccataatgatgttacattgttatgaatcgtatatgttacaagatacatttaatgtgtacactcgcgaatggaatcatatgtgtcatcaacattcgaatagttatatcatgtacaatatactacccatctactaaatataatagaataaaataaatgagtatgatcattttagataacgattgattttatcattaccgcttcattcttatattctttgcttacggaacctatatttagaaacatctactaacgattttttatgcttgcattattaatggtatgtaatatgattgattgtgtacgcaataccaatttgttaagtatgaatacggggtacaaacataaactgaaatttaacattatttatttatgatatatatcgttatcgttattgtttggtctataccatggatatctttaaagaactaatcttaaaacaccctgatgaaaatgttttgatttctccagtttctattttatctactttatctattctaaatcatggagcagctggttctacagctgaacaactatcaaaatatatagagaatatgaatgagaatacacccgatgataagaaggatgacaataatgacatggacgtagatattccgtattgtgcgacactagctaccgcaaataaaatatacggtagcgatagtatcgagttccacgcctccttcctacaaaaaataaaagacgattttcaaactgtaaactttaataatgctaaccaaacaaaggaactaatcaacgaatgggttaagacgatgacaaatggtaaaattaattccttattgactagtccgctatccattaatactcgtatgacagttgttagcgccgtccattttaaagcaatgtggaaatatccattttctaaacatcttacatatacagacaagttttatatttctaagaatatagttaccagtgttgatatgatggtgggtaccgagaataacttgcaatatgtacatattaatgaattattcggaggattctctattatcgatattccatacgagggaaactctagtatggtaattatactaccggacgacatagaaggtatatataacatagaaaaaaatataacagatgaaaaatttaaaaaatggtgtggtatgttatctactaaaagtatagacttgtatatgccaaagtttaaagtggaaatgacagaaccgtataatctggtaccgattttagaaaatttaggacttactaatatattcggatattatgcagattttagcaagatgtgtaatgaaactatcactgtagaaaaatttctacatacgacgtttatagatgttaatgaggagtatacagaagcatcggccgttacaggagtatttatgactaacttttcgatggtatatcgtacgaaggtctacataaaccatccattcatgtacatgattaaagacaacacaggacgtatactttttatagggaaatactgctatccgcaataaatataaacaaatagacttttatcacgtttatctatgtctaaatattacaaatagtaatagtataaactaaagctgataatacttaaaaaaataataatatcatttacaattaatagtataaactaaaaattaaacaaatcgttattataagtaatatcaaaatgatgatatacggattaatagcgtgtcttatattcgtgacttcatccatcgctagtccactttatattcccgttattccacccattacggaagataaatcgttcaatagtgtagaggtattagtttccttgtttagagatgaccaaaaagactatacggtaacttctcagttcaataactacactatcgataccaaagactggactatcggcgtactatccacacctgatggtttggatataccattgactaatataacttattggtcacggtttactataggtcgtgcattgttcaaatcagagtctgaggatattttccaaaagaaaatgagtattctaggtgtttctatagaatgtaagaagtcgtcgacattacttacttttttgaccgtgcgtaaaatgactcgagtatttaataaatttccagatatggcttattatcgaggagactgtttaaaagccgtttatgtaacaatgacttataaaaatactaaaactggagagactgattacacgtacctctctaatggggggttgcctgcatactatcgtaatggggtcgatggttgattattgattagtatattccttattcacacaaaaagaacatttttataaacatgaaaccactgtctaaatgtaattatgatcttgatttatagatgaagatcagcctttagaggattttaaccagtatgtttaatatgaaaaaaataaacataacatattttgagattaagcgctattgtgcttaattattttgctctataaactgaatatatagccacaattattgacgggcttgtttatgaccggcaatcatgaatttacagaaattatctctggctatatatcttactgcgacatgttcgtggtgttatgaaacatgcataagaaaaactgcgttgtatcatgacattcaattggagcatgtagaagacaataaagatagtgtagcgtcgctaccgtacaagtagtcaatcaaagagaacgtagtagattgttggctacatttaattggacagatatagctgagggtgttagaaatgagttcattaaaatatgtgatatcaacggaacatatttatataattatactattgctgttagtataattattgattccacggaagaactaccaacagttactccaattacaacaacatatgaaccttctacatataattatactatcgatgatagcactgttattactactgaagaactacaagtgactcctcatatggatctccatcgatgatacatgtattaaaatactttccgaataagtcttttaaatattgtattaattatgaaaaactatgctatgcgagtatgatgcaaagatgtttaatgatacgatactagattttatctctagcgagagatgtcgttagaatcatttatcataactacgtttaataataattcatcaacgaatatcgataacatgtgtcatttatacgttaaagtctgtccgtcttctctattgtttagactgtttgtagaatgctgtgatataaacaaactagtagaaggtacgactccgttacactgttatctaatgaatgaaggatttgaatcatctgttttaaaaaacctattaaaggagtatgtcatgaatacgtttaatgttcatgacatccattacacaaatatttaactcatgatgaagttgagaatgatatgctttctgatagtatagatagctttagctaatataaaaatatattaatccactatatattctagacttgatttaaaaccgataaactactactacgtactgtataagttgttaaaaaaaggagcagaccctaattatgtagatgatagaggtaatacttttcttcattacttctgcatctatatgtccacttatgagaaaacgtcatttaataagatgcatcgtgaaaagaaatttattaaagagttggtaaaatatgaaaccgaaagtaaataatataggaaatacacctctacataactacgtatctcaatatgatatcactctcattcctcatccacaacccattaaaaaaatggaaattaaagccctctattagcataaacggctacaggtctacctttacaatggcctctccttgtgcccagttcagaccctgtcattgccacgctactaaggactccctgaataccgtggccgacgtcagacattgtctgactgaatacatcctgtgggtttctcatagatggacccatagagaaagcgcagggtctctctacaggcttctcatctctttcagaactgatgcaacggagctctttggtggtgagttgaaggattcacttccgtgggacaatatcgacaattgcgtggagatcattaaatgtttcatcagaaatgactccatgaaaaccgccgaagaacttcgtgcaatcattggactttgtactcaatcagctatcgtctctggaagagtcttcaacgataagtatatcgacatactacttatgctgcgaaagattctgaacgagaacgactatctcaccctcttggatcatatccgcactgctaaatactaaatctccttcatgctctctcactacactttttatcatcttatgaggaatgattgccttcatcatttttcgtgaaataggaataattagcaccagaatagctatggattgcacatgtattctatgtcgtctactggatgaagatgtgacgtacaaaaaaataaaactagaaattgaaacgtgtcacaacttatcaaaacatatagatagacgaggaaacaatgcgctacattgttacgtcttcaataaatgcgatacagacattaagattgttcgactgttactctctcgcggagtcgagagactttgtagaaacaacgaaggattaactccgctaggagcatacagtaagcatagatacgtaaaatctcaaattgtgcatctactgatatccagctattcgaattcctctaacgaactcaagtcgaatataaatgatttcgatctgtattcgtatatgtcttcggataatatcgacttacgtctgctaaaatacctaattgtggataaacggatacgtccgtccaagaatacgaattatgcaatcaatggtctcggattggtggatatatacgtaacgacgcctaatccgagaccagaagtattgctatggcttcttaaatcagaatgttacagcaccggttacgtatttcgtacctgtatgtacgacagtgatatgtgtaagaactctcttcattactatatatcgtctcatagagaatctcaatctctatccaaggatgtaattaaatgtttgatcaataacaatgtttccatccatggcagagacgaaggaggatctttacccatccaatactactggtcttgctcaaccatagatatagagattgttaaattattaataaaggatgtggacacgtgtagagtatacgacgtcagccctatattagaggcggattatctaaacaagcgatttagagtaaccccatataatgtagacatggaaatcgttaatcttcttattgagagacgtcatactcttgtcgacgtaatgcgtagtattacttcttacgattccagagactataaccactacatcatcgataacattctaaagagatttagacaacaggatgaatccatcgtacaagccatgttgataaactacttacattacggcgatatggtcgttcgatgcatgttagataacggacaacaactatcctctgcacgactactttgttaataataatctcgtcgatgtaaacgtcgtaaggtttatcgtggaaaataatggacacatggctgtaaatcacgtatcgaacaatggccgtctatgtatgtacggtctgatattatcgagatttaataattgcgggtatcactgttatgaaaccatactaatagatgtatttgatatactaagcaagtacatggataatatagatatgatcgataatgagaataaaactctactatattacgcggtcgatgtcaataatatacaatttgcaaagcggttattggaatatggagcgagtgttacaacatcacgctcgataatcaatacggccatccagaaaagtagttacagaagagaaaacaaaacgaggatagttgatttattacttagctaccatcccactctagagactatgattgacgcatttaatagagatatacgctatctatatcctgaaccattattcgcctgtatcagatacgccttaatcctagatgatgattttccttctaaagtaagtatgatatctccggtcgtcataaggaactaaagcgctatagagtagacattaatagaatgaagaatgcctacatatcaggcgtctccatgtttgatatattatttaaacgaagcaaacgccacagattgagatacgcaaagaatccgacatcaaatggtacaaaaaagaactaacgtccatcattacagaaactgtaaagaacaatgagaggatcgactccatagtggacaacattaatacagacgataacttgatttcgaaattacccatggagatactttattactccattaaataatttatcatggagcgataatgtcctgtttcatttgtttccatgacatattacaaaatcgattccgtccaagatgataaaaacatttaccggcatcataaacacggagtttattttatatgtctcgcataaacattactaaaaaaatatattgttcggttttctttcacatctttaattatgaaaaagtaaatcattatgagatggacgagattgtacgcatcgttcgcgacagtatgtggtacatacctaacgtatttatggacgacggtaagaatgaaggtcacgtttctgtcaacaatgtttgtcatatgtattttacgttctttgatgtggatacatcgtctcatctgtttaagctagttattaaacactgcgatctgaataaacgaggtaactctccattacattgctatacgatgaatacacgatttaatccatctgtattaaagatattgttacaccacggcatgcgtaactttgatagcaaggatgaaaaaggacatattcctctacaccactatctgattcattcactatcaatcgataacaagatctttgatatactaacggacaccattgatgactttagtaaatcatccgatctattgctgtgttatcttagatataaattcaatgggagcttaaactattacgttctgtacaaaggatccgaccctaattgcgtcgacgaggatggactcacttctcttcattactactgtaaacacatatccacgttctacaaaagcaattattacaagttaagtcacactaagatgcgagccgagaagcgattcatctacgcgataatagattatggagcaaacattaacgcggttacacacttaccttcaacagtataccaaacatagtcctcgtgtggtgtatgctcttttatctcgaggagccgatacgaggatacgtaataatcttgattgtacacccatcatggaacgattgtgcaacaggtcatattctcataatgttactcaattggcacgaacaaaaggaagaaggacaacatctactttatctattcataaaacataatcaaggatacactctcaatatactacggtatctactagataggttcgacattcagaaagacgaatactataataccgcctttcaaaattgtaacaacaatgttgcctcatacatcggatacgacatcaaccttccgactaaagacggtattcgacttggtgtttgaaaacagaaacatcatatacaaggcggatgttgtgaatgacatcatccaccacagactgaaagtatctctacctatgattaaatcgttgttctacaagatgtcagaattctctccctacgacgattactacgtaaaaaagatactagcctactgcctattaagggacgagtcattcgcggaactacatagtaaattctgtttaaacgaggactataaaagtgtatttatgaaaaatatatcattcgataagatagattccatcatcgtgacataagtcgccttaaagagattcgaatctccgacaccgacctgtatacggtatcacagctatcttaaagccatacattcggacagacacatttcatttcccatgtacgacgatctcatagaacagtgccatctatcgatggagcataaaagtaaactcgtcgacaaagcactcaataaattagagtctaccatcggtcaatctagactatcgtatttgcctccggaaattatgcgcaatatcatctaaacagtatgttgtacggaaagaaccattacaaatattatccatgatagaaagaaaatatctatatgattggagaagtaggaaacaggaacaagacgacgattactacattattaaatcatgaagtccgtattatactcgtatatattgtttctctcatgtataataataaacggaagagatatagcaccgcatgcaccatccgatggaaagtgtaaagacaacgaatacaaacgccataatttgtgtccgggaacatacgcttccagattatgcgatagcaagactaacacacgatgtacaccctgtggttcgggtaccttcacatctcgcaataatcatttacccgcttgtctaagttgtaacggaagacgcgatcgtgtaacacgactcacaatagaatctgtgaatgctctcccggatattattgtcttctcaaaggatcatccggatgcaaggcatgtgtttcccaaacaaaatgtggaataggatacggagtatccggagacgtcatctgttctccgtgtggtctcggaacatattctcacaccgtctcttccgcagataaatgcgaacccgtacccagtaatacctttaactatatcgatgtggaaattaatctgtatcccgtcaacgacacgtcgtgtactcggacgaccactaccggtctcagtgaatccatctcaacgtcggaactaactattactatgaatcataaagactgtaatcccgtatttcgtgaggaatacttctctgtccttaataaggtagcaacttcaggtttctttacaggagaaaggtgtgcactctgaatttcgagattaaatgcaataacaaagattcttcctccaaacagttaacgaaagcaaagaatgatgacggtatcatgccgcattcggagacagtaactctagtgggcgactgtatatctagcgtcgacatctatatactatatagtaataccaatactcaagactacgaaactgatacaatctcttatcatgtgggtaatgttctcgatgtcgatagccatatgcccggtagttgcgatatacataaactgatcactaattccaaacccacccgctttttatagtaagtttttcacccataaataataaatacaataattaatttctcgtaaaagtagaaaatatattctaatttattgcatggtaaggaagtagaatcataaagaacagtactcaatcaatagcaattatgaaacaatatatcgtcctggcatgcatgtgcctgccagtcttcagcaatcatcctcatcctcatcctcgtgtacggaagaagaaaacaaacatcatatgggaatcgatgttattatcaaagtcacaaagcaagaccaaacaccgaccaatgataagatttgccaatccgtaacggaaattacagagtccgagtcagatccaaatcccgaggtggaatcagaagatgattccacatcagtcgaggatgtagatcctcctaccacttattactccatcatcggtggaggtctgagaatgaactttggattcaccaaatgtcctcagattaaatccatctcagaatccgctgatggaaacacagtgaatgctagattgtccagcgtgtccccaggacaaggtaaggactctcccgcgatcactcatgaagaagctcttgctatgatcaaagactgtgaggtgtctatcgacatcagatgtagcgaagaagagaaagacagcgacatcaagacccatccagtactcgggtctaacatctctcataagaaagtgagttacgaagatatcatcggttcaacgatcgtcgatacaaaatgtgtcaagaatctagagtttagcgttcgtatcggagacatgtgcaaggaatcatctgaacttgaggtcaaggatggattcaagtatgtcgacggatcggcatctgaaggtgcaaccgatgatacttcactcatcgattcaacaaaactcaaagcgtgtgtctgaatcgataactctattcatctgaaattggatgagtagggttaatcgaacgattcaggcacaccacgaattaaaaaagtgtaccggacactatattccggtttgcaaaacaaaaatgttcttaactacattcacaaaaagttacctctcgcgacttcttctttttctgtctcaatagtgtgatacgattatgacactattcctattcctattcctatttcctttcagggtatcacaaaaatattaaacctctttctgatggtctcataaaaaaagttttacaaaaatatttttattctctttctctctttgatggtctcataaaaaaagttttacaaaaatatttttattctctttctctctttgat

SEQ ID NO: 83 - DNA, 198421 bp, Vaccinia virus
  source 1..198421: mol_type = genomic DNA
  misc_feature 1..198421: note = VIR104
atcaaagagagaaagagaataaaaatatttttgtaaaactttttttatgagaccatcaaagagagaaagagaataaaaatatttttgtaaaactttttttatgagaccatcagaaagaggtttaatatttttgtgataccctgaaaggaaataggaataggaataggaatagtgtcataatcgtatcacactattgagacagaaaaagaagaagtcgcgagaggtaactttttgtgaatgtagttaagaacatttttgttttgcaaaccggaatatagtgtccggtacacttttttaattcgtggtgtgcctgaatcgttcgattaaccctactcatccaatttcagatgaatagagttatcgattcagacacacgctttgagttttgttgaatcgatgagtgaagtatcatcggttgcaccttcagatgccgatccgtcgacatacttgaatccatccttgacctcaagttcagatgattccttgcacatgtctccgatacgaacgctaaactctagattcttgacacattttgtatcgacgatcgttgaaccgatgatatcttcgtaactcactttcttatgagagatgttagacccgagtactggatgggtcttgatgtcgctgtctttctcttcttcgctacatctgatgtcgatagacacctcacagtctttgatcatagcaagagcttcttcatgagtgatcgcgggagagtccttaccttgtcctggggacacgctggacaatctagcattcactgtgtttccatcagcggattctgagatggatttaatctgaggacatttggtgaatccaaagttcattctcagacctccaccgatgatggagtaataagtggtaggaggatctacatcctcgactgatgtggaatcatcttctgattccacctcgggatttggatctgactcggactctgtaatttccgttacggattggcaaatcttatcattggtcggtgtttggtcttgctttgtgactttgataataacatcgattcccatatgatgtttgttttcttcttccgtacacgaggatgaggatgaggatgattgctgaagactggcaggcacatgcatgccaggacgatatattgtttcataattgctattgattgagtactgttctttatgattctacttccttaccatgcaataaattagaatatattttctacttttacgagaaattaattattgtatttattatttatgggtgaaaaacttactataaaaagcgggtgggtttggaattagtgatcagtttatgtatatcgcaactaccgggcatatggctatcgacatcgagaacattacccacatgataagagattgtatcagtttcgtagtcttgagtattggtattactatatagtatatagatgtcgacgctagatatacagtcgcccactagagttactgtctccgaatgcggcatgataccgtcatcattctttgctttcgttaactgtttggaggaagaatctttgttattgcatttaatctcgaaattcagagtgcacacctttctcctgtaaagaaacctgaagttgctaccttattaaggacagagaagtattcctcacgaaatacgggattacagtctttatgattcatagtaatagttagttccgacgttgagatggattcactgagaccggtagtggtcgtccgagtacacgacgtgtcgttgacgggatacagattaatttccacatcgatatagttaaaggtattactgggtacgggttcgcatttatctgcggaagagacggtgtgagaatatgttccgagaccacacggagaacagatgacgtctccggatactccgtatcctattccacattttgtttgggaaacacatgccttgcatccggatgatcctttgagaagacaataatatccgggagagcattcacagattctattgtgagtcgtgttacacgatcgcgtcttccgttacaacttagacaagcgggtaaatgattattgcgagatgtgaaggtacccgaaccacagggtgtacatcgtgtgttagtcttgctatcgcataatctggaagcgtatgttcccggacacaaattatggcgtttgtattcgttgtctttacactttccatcggatggtgcatgcggtgctatatctcttccgtttattattatacatgagagaaacaatatatacgagtataatacggacttcatgatttaataatgtagtaatcgtcgtcttgttcctgtttcctacttctccaatcatatagatattttctttctatcatggataatatttgtaatggttctttccgtacaacatactgtttagatgatattgcgcataatttccggaggcaaatacgatagtctagattgaccgatggtagactctaatttattgagtgctttgtcgacgagtttacttttatgctccatcgatagatggcactgttctatgagatcgtcgtacatgggaaatgaaatgtgtctgtccgaatgtatggctttaagatagctgtgataccgtatacaggtcggtgtcggagattcgaatctctttaaggcgacttatgtcacgatgatggaatctatcttatcgaatgatatatttttcataaatacacttttatagtcctcgtttaaacagaatttactatgtagttccgcgaatgactcgtcccttaataggcagtaggctagtatcttttttacgtagtaatcgtcgtagggagagaattctgacatcttgtagaacaacgatttaatcataggtagagatactttcagtctgtggtggatgatgtcattcacaacatccgccttgtatatgatgtttctgttttcaaacaccaagtcgaataccgtctttagtcggaaggttgatgtcgtatccgatgtatgaggcaacattgttgttacaattttgaaaggcggtattatagtattcgtctttctgaatgtcgaacctatctagtagataccgtagtatattgagagtgtatccttgattatgttttatgaatagataaagtagatgttgtccttcttccttttgttcgtgccaattgagtaacattatgagaatatgacctgttgcacaatcgttccatgatgggtgtacaatcaagattattacgtatcctcgtatcggctcctcgagataaaagagcatacaccacacgaggactatgtttggtatactgttgaaggtaagtgtgtaaccgcgttaatgtttgctccataatctattatcgcgtagatgaatcgcttctcggctcgcatcttagtgtgacttaacttgtaataattgcttttgtagaacgtggatatgtgtttacagtagtaatgaagagaagtgagtccatcctcgtcgacgcaattagggtcggatcctttgtacagaacgtaatagtttaagctcccattgaatttatatctaagataacacagcaatagatcggatgatttactaaagtcatcaatggtgtccgttagtatatcaaagatcttgttatcgattgatagtgaatgaatcagatagtggtgtagaggaatatgtcctttttcatccttgctatcaaagttacgcatgccgtggtgtaacaatatctttaatacagatggattaaatcgtgtattcatcgtatagcaatgtaatggagagttacctcgtttattcagatcgcagtgtttaataactagcttaaacagatgagacgatgtatccacatcaaagaacgtaaaatacatatgacaaacattgttgacagaaacgtgaccttcattcttaccgtcgtccataaatacgttaggtatgtaccacatactgtcgcgaacgatgcgtacaatctcgtccatctcataatgatttactttttcataattaaagatgtgaaagaaaaccgaacaatatatttttttagtaatgtttatgcgagacatataaaataaactccgtgtttatgatgccggtaaatgtttttatcatcttggacggaatcgattttgtaatatgtcatggaaacaaatgaaacaggacattatcgctccatgataaattatttaatggagtaataaagtatctccatgggtaatttcgaaatcaagttatcgtctgtattaatgttgtccactatggagtcgatcctctcattgttctttacagtttctgtaatgatggacgttagttcttttttgtaccatttgatgtcggattctttgcgtatctcaatctgtggcgtttgcttcgtttaaataatatatcaaacatggagacgcctgatatgtaggcattcttcattctattaatgtctactctatagcgctttagttccttatgacgaccggagatatcatacttactttagaaggaaaatcatcatctaggattaaggcgtatctgatacaggcgaataatggttcaggatatagatagcgtatatctctattaaatgcgtcaatcatagtctctagagtgggatggtagctaagtaataaatcaactatcctcgttttgttttctcttctgtaactacttttctggatggccgtattgattatcgagcgtgatgttgtaacactcgctccatattccaataaccgctttgcaaattgtatattattgacatcgaccgcgtaatatagtagagttttattctcattatcgatcatatctatattatccatgtacttgcttagtatatcaaatacatctattagtatggtttcataacagtgatacccgcaattattaaatctcgataatatcagaccgtacatacatagacggccattgttcgatacgtgatttacagccatgtgtccattattttccacgataaaccttacgacgtttacatcgacgagattattattaacaaagtagtcgtgcagaggatagttgttgtccgttatctaacatgcatcgaacgaccatatcgccgtaatgtaagtagtttatcaacatggcttgtacgatggattcatcctgttgtctaaatctctttagaatgttatcgatgatgtagtggttatagtctctggaatcgtaagaagtaatactacgcattacgtcgacaagagtatgacgtctctcaataagaagattaacgatttccatgtctacattatatggggttactctaaatcgcttgtttagataatccgcctctaatatagggctgacgtcgtatactctacacgtgtccacatcctttattaataatttaacaatctctatatctatggttgagcaagaccagtagtattggatgggtaaagatcctccttcgtctctgccatggatggaaacattgttattgatcaaacatttaattacatccttggatagagattgagattctctatgagacgatatatagtaatgaagagagttcttacacatatcactgtcgtacatacaggtacgaaatacgtaaccggtgctgtaacattctgatttaagaagccatagcaatacttctggtctcggattaggcgtcgttacgtatatatccaccaatccgagaccattgattgcataattcgtattcttggacggacgtatccgtttatccacaattaggtattttagcagacgtaagtcgatattatccgaagacatatacgaatacagatcgaaatcatttatattcgacttgagttcgttagaggaattcgaatagctggatatcagtagatgcacaatttgagattttacgtatctatgcttactgtatgctcctagcggagttaatccttcgttgtttctacaaagtctctcgactccgcgagagagtaacagtcgaacaatcttaatgtctgtatcgcatttattgaagacgtaacaatgtagcgcattgtttcctcgtctatctatatgttttgataagttgtgacacgtttcaatttctagttttatttttttgtacgtcacatcttcatccagtagacgacatagaatacatgtgcaatccatagctattctggtgctaattattcctatttcacgaaaaatgatgaaggcaatcattcctcataagatgataaaaagtgtagtgagagagcatgaaggagatttagtatttagcagtgcggatatgatccaagagggtgagatagtcgttctcgttcagaatctttcgcagcataagtagtatgtcgatatacttatcgttgaagactcttccagagacgatagctgattgagtacaaagtccaatgattgcacgaagttcttcggcggttttcatggagtcatttctgatgaaacatttaatgatctccacgcaattgtcgatattgtcccacggaagtgaatccttcaactcaccaccaaagagctccgttgcatcagttctgaaagagatgagaagcctgtagagagaccctgcgctttctctatgggtccatctatgagaaacccacaggatgtattcagtcagacaatgtctgacgtcggccacggtattcagggagtccttagtagcgtggcaatgacagggtctgaactgggcacaaggagaggccattgtaaaggtagacctgtagccgtttatgctaatagagggctttaatttccatttttttaatgggttgtggatgaggaatgagagtgatatcatattgagatacgtagttatgtagaggtgtatttcctatattatttactttcggtttcatattttaccaactctttaataaatttcttttcacgatgcatcttattaaatgacgttttctcataagtggacatatagatgcagaagtaatgaagaaaagtattacctctatcatctacataattagggtctgctcctttttttaacaacttatacagtacgtagtagtagtttatcggttttaaatcaagtctagaatatatagtggattaatatatttttatattagctaaagctatctatactatcagaaagcatatcattctcaacttcatcatgagttaaatatttgtgtaatggatgtcatgaacattaaacgtattcatgacatactcctttaataggttttttaaaacagatgattcaaatccttcattcattagataacagtgtaacggagtcgtaccttctactagtttgtttatatcacagcattctacaaacagtctaaacaatagagaagacggacagactttaacgtataaatgacacatgttatcgatattcgttgatgaattattattaaacgtagttatgataaatgattctaacgacatctctcgctagagataaaatctagtatcgtatcattaaacatctttgcatcatactcgcatagcatagtttttcataattaatacaatatttaaaagacttattcggaaagtattttaatacatgtatcatcgatggagatccatatgaggagtcacttgtagttcttcagtagtaataacagtgctatcatcgatagtataattatatgtagaaggttcatatgttgttgtaattggagtaactgttggtagttcttccgtggaatcaataattatactaacagcaatagtataattatataaatatgttccgttgatatcacatattttaatgaactcatttctaacaccctcagctatatctgtccaattaaatgtagccaacaatctactacgttctctttgattgactacttgtacggtagcgacgctacactatctttattgtcttctacatgctccaattgaatgtcatgatacaacgcagtttttcttatgcatgtttcataacaccacgaacatgtcgcagtaagatatatagccagagataatttctgtaaattcatgattgccggtcataaacaagcccgtcaataattgtggctatatattcagtttatagagcaaaataattaagcacaatagcgcttaatctcaaaatatgttatgtttatttttttcatattaaacatactggttaaaatcctctaaaggctgatcttcatctataaatcaagatcataattacatttagacagtggtttcatgtttataaaaatgttctttttgtgtgaataaggaatatactaatcaataatcaaccatcgaccccattacgatagtatgcaggcaaccccccattagagaggtacgtgtaatcagtctctccagttttagtatttttataagtcattgttacataaacggcttttaaacagtctcctcgataataagccatatctggaaatttattaaatactcgagtcattttacgcacggtcaaaaaagtaagtaatgtcgacgacttcttacattctatagaaacacctagaatactcattttcttttggaaaatatcctcagactctgatttgaacaatgcacgacctatagtaaaccgtgaccaataagttatattagtcaatggtatatccaaaccatcaggtgtggatagtacgccgatagtccagtctttggtatcgatagtgtagttattgaactgagaagttaccgtatagtctttttggtcatctctaaacaaggaaactaatacctctacactattgaacgatttatcttccgtaatgggtggaataacgggaatataaagtggactagcgatggatgaagtcacgaatataagacacgctattaatccgtatatcatcattttgatattacttataataacgatttgtttaatttttagtttatactattaattgtaaatgatattattatttttttaagtattatcagctttagtttatactattactatttgtaatatttagacatagataaacgtgataaaagtctatttgtttatatttattgcggatagcagtatttccctataaaaagtatacgtcctgtgttgtctttaatcatgtacatgaatggatggtttatgtagaccttcgtacgatataccatcgaaaagttagtcataaatactcctgtaacggccgatgcttctgtatactcctcattaacatctataaacgtcgtatgtagaaatttttctacagtgatagtttcattacacatcttgctaaaatctgcataatatccgaatatattagtaagtcctaaattttctaaaatcggtaccagattatacggttctgtcatttccactttaaactttggcatatacaagtctatacttttagtagataacataccacaccattttttaaatttttcatctgttatatttttttctatgttatatataccttctatgtcgtccggtagtataattaccatactagagtttccctcgtatggaatatcgataatagagaatcctccgaataattcattaatatgtacatattgcaagttattctcggtacccaccatcatatcaacactggtaactatattcttagaaatataaaacttgtctgtatatgtaagatgtttagaaaatggatatttccacattgctttaaaatggacggcgctaacaactgtcatacgagtattaatggatagcggactagtcaataaggaattaattttaccatttgtcatcgtcttaacccattcgttgattagttcctttgtttggttagcattattaaagtttacagtttgaaaatcgtcttttattttttgtaggaaggaggcgtggaactcgatactatcgctaccgtatattttatttgcggtagctagtgtcgcacaatacggaatatctacgtccatgtcattattgtcatccttcttatcatcgggtgtattctcattcatattctctatatattttgatagttgttcagctgtagaaccagctgctccatgatttagaatagataaagtagataaaatagaaactggagaaatcaaaacattttcatcagggtgttttaagattagttctttaaagatatccatggtatagaccaaacaataacgataacgatatatatcataaataaataatgttaaatttcagtttatgtttgtaccccgtattcatacttaacaaattggtattgcgtacacaatcaatcatattacataccattaataatgcaagcataaaaaatcgttagtagatgtttctaaatataggttccgtaagcaaagaatataagaatgaagcggtaatgataaaatcaatcgttatctaaaatgatcatactcatttattttattctattatattaacacatacatttttaacagcaacacattcaatattgtattgttatttttatattatttacacaattaacaatatattattagtttatattactgaattaataatataaaattcccaatcttgtcataaacacacactgagaaacagcataaacacaaaatccatcaaaaatgtcgatgaaatatctgatgttgttgttcgctgctatgataatcagatcattcgccgatagtggtaacgctatcgaaacgacattgccagaaattacaaacgctacaacagatattccagctatcagattatgcggtccagagggagatggatattgtttacacggtgactgtatccacgctagagatatcgacggtatgtattgtagatgctctcatggttatacaggcattagatgtcagcatgtagtattagtagactatcaacgttcagaaaaaccaaacactacaacgtcatatatcccatctcccggtattgtgcttgtattagtaggcattattattatgtgttgtctattatctgtttataggttcactcgaagaactaataaactacctctacaagatatggttgtgccataatttttataaatttttttatgagtatttttacaaaaaaaatgtataaagtgtatgtcttatgtatatttataaaaatgctaagtatgcgatgtatctatgttatttgtatttatctaaacaatacctctacctctagatattatacaaaaattttttatttcggcatattaaagtaaaatctagttaccttgaaaatgaatacagtgggtggttccgtatcaccagtaagaacataatagtcgaatacagtatccgattgagattttgcatacaatactagtctagaaagaaatttgtaatcattttctgtgacgggagtccatatatctgtatcatcgtctagtttatcagtgtcccatgctatatttctgttatcatcattagttaatgaaaataactctcgtgcttcagaaaagtcaaatattgtatccatacatacatctccaaaactatcgcttatacgtttatctttaacgatacctatacctagatggttatttactaacagacattttccagatctattgactataactcctatagtttccacatcaaccaagtaatgatcatctattgttatataacaataacataactcttttccatttttatcagtatgtatatctatatcaacgtcgtcgttgtagtgaatagtagtcattgatctattatatgaaacggatatgtctagaacggcaattgtcttacgtccagttaacactttcgttgatttaaagtctagagtctttgcaaacataatatccttatccgactttatatttcctgtagggtggtataattttattttgcctccacatatcggtgtttccaaatatattactagacaatattccatatagttattagttaagggtacccaattagaacacgtacgcttattatcatcatttggatcgtatttcataaaagttattgtactatcgatgtcaacacattctacattttttaatcgtctatatagtatttttctgatattttctataatatcagaattgtcttccatcggaagttgtatactatcggaatcagttacatgtttaaataattctctgatgtcattccttatacaatcaaattcattattaaacagtttaatagtctgtagacctttatcgtcgtaaatatccattgtcttattagttacgcttatttttatgtgttttacgttgctttattatattttataagaatgattgtttgacgaatcacgagaactattaagacacattattaggtatatattataaaaaagtttttgattacgatgttataagaggaaagaggacacattaacatcatacatcaattaactacattcttataacatcgtaatcaaaagaattgcaattttgatgtataacaactgtcaatgggttatggaattgtatattacatattatacggtatgttggtaacgacaaataccgatcggtaatcgtttgccggtgtaatagaattatatatatctatctattacaccggctgagtatacataataataagttgtggtagtatgatctccatatttataatttaggactttgtattcagtatttttggaatcataaaaaataaaaaaaagttttactaatttaaaatttaaaaagtatttacatttttttcactgtttagtcgcggatatggaattcgatcctgccaaaatcaatacatcatctatagatcatgtaacaatattacaatacatagatgaaccaaatgatataagactaacagtatgcattatccgaaatattaataacattacatattatatcaatatcacaaaaataaatacacatttggctaatcaatttcgggcttggaaaaaacgtatcgccggaagggactatatgactaacttatctagagatacaggaatacaacaatcaaaacttactgaaactatacgtaactgtcaaaaaaatagaaacatatatggtctatatatacactacaatttagttattaatgtggttattgattggataaccgatgtgattgttcaatcaatattaagagggttggtaaattggtacatagctaataatacctatactccaaatacacccaataatacaacaaccatttctgagttggatatcatcaaaatactaaataaatacgaggacgtgtatagagtaagtaaagaaaaagaatgtggaatttgctatgaagttgtttactcaaaacgattagaaaacgatagatactttggtttattggattcgtgtactcatatattttgcataacatgcatcaatatatggcataaaacacgaagagaaaccggtgcgtcggataattgtcctatatgtcgtacccgttttagaaacataacaatgagcaagttctataagctagttaactaataaataaaaagtttaatttgttgacgacgtatgtcgttattttttctcgtataaaagattaatttgattctaatataatctttagtattggataaatatcaattcaaattaattccattagattatatcataaataaaaatagtagcacgcactacttcagccaaatattcttttttgaaacgccatctatcgtagtgaggacacaagtgaacctataatgagcaaatttattagtatcggttacatgaaggactttacgtagagtggtgattccactatctgtggtacgaacggtttcatcttctttgatgccatcacccagatgttctataaacttggtatcctcgtccgatttcatatcctttgccaaccaatacatatagctaaactcaggcatatgttccacacatcctgaacaatgaaattctccagaagatgttacaatgtctagatttggacatttggtttcaaccgcgttaacatatgagtgaacacacccatacatgaaagcgatgagaaataggattttcatcttgccaaaatatcactagaaaaaatttatttatcaattttaaaggtataaaaaatacttattgttgctcgaatattttgtatttgatggtatacggaagattagaaatgtaggtattatcatcaactgattctatggttttatgtattctatcatgtttcactattgcgttggaaataatatcatatgcttccacatatattttattttgttttaactcataatactcacgtaattctggattattggcatatctgtgaataattttagctccatgatcagtaaatattaatgagaacatagtattaccacctaccattatttttttcatttcgttcaattcttgattgcaaagatctatataatcattatagcgttgacttatggactctggaatcttagacgatgtacagtcatctataatcatggcatatttaatacattgttttatagcatagtagttatctacgatgttagatatttctctcaatgaatcaatcacacaatctaatgtaggtttatgacataatagcattttcagcagttcaatgtttctagattcgttgatggcaatggctatacatgtatatccgttatttgatctaatgttgacatctgaaccggattctagcagtaaagatactagagattgtttattatatctaacagccttgtgaagaagtgtttctcctcgtttgtcaatcatgttaatgtctttaagataaggtaggcaaatgtttatagtactaagaattgggcaagcataagacatgtcacaaagaccctttttgtatgtataagtgtagaaattataacatccatagttggatttacataggtgtccaatcgggatctctccatcatcgagatgattgacggcatctcccccttccttttttagtagatatttcatcgtgtaagaatcaatattaatatttctaaagtatccgtgtatagcctctttatttaccacagctccatattccaacatgcattccactaaagggatatcgatatcgccgaatgtcatatactcaattagtatatgttggaggacatccgagttcattgttttcaatatcaaagagatggtttccttatcatttctccatagtggtacaatactacacattattccgtgaggctttccattctccaaaaacaatttgaccaaatctacatctttattgtatctataatcactatttagataatcagccataattcctcgagtgcaacatgttagatcgtctatatatgaataagccgtgttatctattcctttcattaacaatttaacgatgtctatatctatatgagatgacttaatataatattgaagagctgtacaatagtttttatctatagaagacggcttgattccgtgattaattagacatttaacaacttccggacgcacatatgctctcgtatccgactctgaatacagatgagagatgatatacagatgcaatacggtaccgcaatttcgtagttgataatcatcatacgcgtatccgtactcgtcctcataaagaacactgcagccattttctatgaacaaatcaataattttaggaacaggatcattgtcattacataattttctataactgaacgatggttttcacatttaacactcaagtcaaatccatgttctaccaacacctttatcaagtcaacgtctacatttttggatttcatatagctgaatatattaaagtcatttatgttgctaaatccagtggcttctagtagagccatcgctatatcctttaactttaacatgtctactatttgtgtattcttctaatggggtagctgtctccaatttttgcgtaatggattagtgccactgtctagtagtagtttgacgacctcgacattattacaatgctcattaaaaaggtatgcgtgtaaagcattattcttgaattggttcctggtatcattaggatctctgtctctcaacatctgtttaagttcatcgagagccacctcctcattttccaaatagtcaaacattttgactgaatagaagtgaatgagctactgtgaactctatacacccacacaactaatgtcattaaatattatttttttgaatgtatttataccatgtcaaaaacttgtacaattattaataaaaataatttagtgtttaaattttaccagttccagattttacacctccgttaaccccactttttacaccactggacgaccctcctccccacattccaccgccaccagatgtataagttttagatcctttattactaccatcatgtccatggataaagacactccacatgccgccactaccccctttagaagacatattaataagacttaagagttaaggacaagtttaacaataaaattaatcacgagtaccctactaccaacctacactattatatgattatagtttctatttttacagtaccttaactaaagtttctagtcacaagagcaatactaccaacctacactattatatgattatagtttctatttttataggaacgcgtacgagaaaatcaaatgtctaatttctaacggtagtgttgataaacgattatcgtcaatggatacctcctctatcatgtcgtctattttcttactttgttctattaacttattagcattatatattatttgattataaaacttatattgcttattagcccaatctgtaaatatcggattattaacatatcgtttctttgtaggtttatttaacttgtacatcactgtaagcatgtccgtaccatttattttaatttgacgcatatccgcaatttctttttcgcagtcggttataaattctatatatgatggatacatgctacatgtgtacttataatcgactaatatgaagtacttgatacatattttcagtaacgatttattattaccacctatgaataagtacctgtgatcgtctaggtaatcaactgttttcttaatacattcgatggttggtaatttactcagaataatttccaatatcttaatatataattctgctatttctggaatatatttatctgccagtataacacaaatagtaatacatgtaaacccatattttgttattatattaatgtctgcgccattatctattaaccattctactaggctgacactatgcgacttaatacaatgataaagtatactacatccatgtttatctattttgtttatatcatcaatatacggcttacaaagttttagtatcgataacacatccaactcacgcatagagaaggtagggaataatggcataatatttattaggttatcatcattgtcattatctacaactaagtttccattttttaaaatatactcgacaactttaggatctctattgccaaatttttgaaaatatttatttatatgcttaaatctatataatgtagctccttcatcaatcatacatttaataacattgatgtatactgtatgataagatacatattctaacaatagatcttgtatagaatctgtatatcttttaagaattgtggatattaggatattattacgtaaactattacacaattctaaaatataaaacgtatcacggtcgaataatagttgatcaactatataattatcgattttgtgatttttcttcctaaactgtttacgtaaatagttagatagaatattcattagttcatgaccactatagttactatcgaataacgcgtcaaatatttcccgtttaatatcgcatttgtcaagataataatagagtgtggtatgttcacgataagtataataacgcatctctttttcgtgtgaaattaaatagtttatcacgtccaaagatgtagcataaccatcttgtgacctagtaataatataataatagagaactgttttacccattctatcatcataatcagtggtgtagtcgtaatcgtaatcgtctaattcatcatcccaattataatattcaccagcacgtctaatctgttctattttgatcttgtatccatactgtatgttgctacatgtaggtattcctttatccaataatagtttaaacacatctacattgggatttgatgttgtagcgtatttctctacaatattaataccatttttgatactatttatttctatacctttcgaaattagtaatttcaataagtctatatcgatgttatcagaacatagatattcgaatatatcaaaatcattgatatttttatagtcgactgacgacaataacaaaatcacaacatcgtttttgatattattatttttcttggtaacgtatgcctttaatggagtttcaccatcatactcatataatggatttgcaccactttctatcaatgattgtgcactgctggcatcgatgttaaatgttttacaactatcatagagtatcttatcgttaaccatgattggttgttgatgctatcgcattttttggtttctttcatttcagttatgtatggatttagcacgtttgggaagcataagctcatatgatttcagtactgtagtgtcagtactattagtttcgatcagatcaatgtctagatctatagaatcaaaacacgataggtcagaagataatgaatatctgtaggcttcttgttgtactgtaacttctcgttttgttagatggttgcatcgtgctttaacatcaatggtacaaattttatcctcgctttgtgtatcatattcgtccctactataaaattgtatattcagattatcatgagatgtgtatacgctaacggtatcaataaacggagcacaccatttagtcataaccgtaatccaaaaatttttaaagtatatcttaacgaaagaagttgtgtcattgtctacggtgtatggtactagatcctcataagtgtatatatctagagtaatgtttaatttatcaaatggttgataatatggatcctcatggcaatttcctaagacgaaaataagacataaacacgcaataaatctaattgcggacatggttactccttaaaaaaatactaataatcaccttggctatttagtaagtgtcatttaacactatactcatattaatccatggactcataatctctatacgggattaacggatgttctatatacggggatgagtagttctcttctttaactttatactttttactaatcatatttagactgatgtatgggtaatagtgtttgaagagctcgttctcatcatcagaataaatcaatatctctgtttttttgttatacagatgtattacagcctcatatattacgtaatagaacgtgtcatctaccttattaactttcaccgcatagttgtttgcaaatacggttaatcctttgacctcgtcgatttccgaccaatctgggcgtataatgaatctaaactttaatttcttgtaatcattcgaaataatttttagtttgcatccgtagttatcccctttatgtaactgtaaatttctcaacgcgatatctccattaataatgatgtcgaattcgtgctgtatacccatactgaatggatgaacgaataccgacggcgttaatagtaatttactttttcatctttacatattgggtactagttttactatcataagtttataaattccacaagctactatggaataagccaaccatcttagtataacacacatgtcttaaagtttattaattaattacatgttgttttatatatcgctacgaatttaaacagagaaatcagtttaggaaaaaaaattatctatctacatcatcacgtctctgtattctacgatagagtgctactttaagatgagacatatccgtgtcatcaaaaatatactccattaaaatgattattccggcagcgaacttgatattggatatatcacaacctttgttaatatctacgacaatagacagcagtcccatggttccataaacagtgagtttatctttctttgaagagatattttgtagagatcttataaaactgtcgaatgacatcgcatttatatctttagctaaatcgtatatgttaccatcgtaatatctaaccgcgtctatcttaaacgtttccatcgctttaaagacgtttccgatagatggtctcatttcatcagtcatactgagccaacaaatataatcgtgtataacatctttgatagaatcagactctaaagaaaacgaatcggctttattatacgcattcatgataaacttaatgaaaaatgtttttcgttgtttaagttggatgaatagtatgtcttaataattgttattatttcattaattaatatttagtaacgagtacactctataaaaacgagaatgacataactaatcataactagttatcaaagtgtctaggacgcgtaattttcatatggtatagatcctgtaagcattgtctgtattctggagctattttctctatcgcattagtgagttcagaatatgttataaatttaaatcgaataacgaacataactttagtaaagtcgtctatattaactcttttattttctagccatcgtaataccatgtttaagatagtatattctctagttactacgatctcatcgttgtctagaatatcacatactgaatctacatccaattttagaaattggtctgtgttacatatctcttctatattattgttgatgtattgtcgtagaaaactattacgtagaccattttctttataaaacgaatatatagtactccaattatctttaccgatatatttgcacacataatccattctctcaatcactacatctttaagattttcgttgttaagatatttggctaaactatataattctattagatcatcaacagaatcagtatatatttttctagatccaaagacgaactctttggcgtcctctataatattcccagaaaagatattttcgtgttttagtttatcgagatctgatctgttcatatacgccatgattgtacggtacgttatgataaccgcataaaataaaaatccattttcatttttaaccaatactattcataattgagattgatgtaatactttgttactttgaacgtaaagacagtacacggatccgtatctccaacaagcacgtagtaatcaaatttggtgttgttaaacttcgcaatatttatcaatttagatagaaacttatactcatcatctgttttaggaatccatgtattattaccactttccaacttatcattatcccaggctatgtttcgtccatcatcgttgcgcagagtgaataattcttttgtattcggtagttcaaatatataatccatgcatagatcggtaaagctattgtagatgtgatttttcctaaatctaatataaaactcgtttactagcaaacactttcctgatttatcgaccaagacacatatggtttctaaatctatcaagtggtggggatccatagttatgacgcagtaacatagattattaccttcttaactgtcgctaatatctatatatttattgttatcgtattggattctgcatatagatggcttgtatgtcaaagatatagaacacataaccaatttatagtcgcgctttacattctcgaatctaaagttaagagatttagaaaacattatatcctcggatgatgttatcactgtttctggagtaggatatattaaagtctttacagatttcgtccgattcaaataaatcactaaataatatcccacattatcatctgttagagtagtatcattaaatctattatattttatgaaagatatatcactgctcacctctatatttcgtacatttttaaactgtttgtataatatctctctgatacaatcagatatatctattgtgtcggtagacgataccgttacatttgaattaatggtgttccattttacaacttttaacaagttgaccaattcatttctaatagtatcaaacgctccatgattaaatattttaatagtatccattttatatcactacggacacaaagtagctgacataaaccattgtataatttttatgttttatgtttattagcgtacacattttggaagttccggcttccatgtatttcctggagagcaagtagatgatgaggaaccagataggttatatccgtacttgcacttaaagtttacattgtcgttgtatgagtatgatcttttaaacccgctagacaagtatccgtttgatattgtaggatgtggacatttaacaatctgacacgtgggtggatcggaccattctcctcctgaacacaggacaccagagttaccaatcaacgaatatccactattgcaactataagttacaacgcttccatcggtataaaaatcctcgtatccgttatgtcttccgttggatatagatggaggggattggcatttaacagattcacaaataggtgcctcgggattccataccatagatccagtagatcctaattcacaatacgatttagattcaccgatcaaatgatatccgctattacaagagtacgttatactagagccaaagtctactccgccaatatcaagttggccattatcgatatctcgaggcgatgggcatctccgtttaatacattgattaaagagtgtccatccagtacctgtacatttagcatatataggtcccattttttgctttctgtatccaggtagacatagatattctatagtgtctcctatgttgtaattagcattagcatcagtctccacactattcttaaatttcatattaatgggtcgtgacggaatagtacagcatgatagaacgcatcctattcccaacaatgtcaggaacgtcacgctctccaccttcatatttatttatccgtaaaaatgttatcctggacatcgtacaaataataaaaagcccatatatgttcgctattgtagaaattgtttttcacagttgctcaaaaacgatggcagtgacttatgagttacgttacactttggagtctcatctttagtaaacatatcataatattcgatattacgagttgacatatcgaacaaattccaagtatttgattttggataatattcgtattttgcatctgctataattaagatataatcaccgcaagaacacacgaacatctttcctacatggttaaagtacatgtacaattctatccatttgtcttccttaactatatatttgtatagataattacgagtctcgtgagtaattccagtaattacatagatgtcgccgtcgtactctacagcataaactatactatgatgtctaggcatgggagacttttttatccaacgatttttagtgaaacattccacatcgtttaatactacatatttttcatacgtggtataaactccacccattacatatatatcatcgtttacgaataccgacgcgcctgaatatctaggagtaattaagtttggaagtcttatccatttcgaagtgccgtgtttcaaatattctgccacacccgttgaaatagaaaattctaatcctcctattacatataactttccattgttaacacaagtactaacttctgattttaacgacgacatattagtaaccgttttccattttttcgtttcaagatctacccgcgatacggaataaacatgtctattgttaatcatgccgccaataatgtatagacaattatgtaaaacatttgcattatagaattgtctatctgtattaccgactatcgtccaatattctgttctaggagagtaatgggttattgtggatatataatcagagtttttaatgactactatattatgttttataccatttcgtgtcactggctttgtagatttggatatagttaatcccaacaatgatatagcattgcgcatagtattagtcataaacttgggatgtaaaatgttgatgatatctacatcgtttggatttttatgtatccactttaataatatcatagctgtaacatcctcatgatttacgttaacgtcttcgtgggataagatagttgtcagttcatcctttgataattttccaaattctggatcggatgtcaccgcagtaatattgttgattatttctgacatcgacgcattatatagttttttaattccatatcttttagaaaagttaaacatccttatacaatttgtggaattaatattatgaatcatagtttttacacatagatctactacaggcggaacatcaattattatggcagcaactagtatcatttctacattgtttatggtgatgtttatcttcttccagcgcatatagtctaatagcgattcaaacgcgtgatagtttataccattcaatataatcgcttcatcctttagatggtgatcctgaatgcgtttaaaaaaattatacggagatgccgtaataatttccttattcacttgtataatttccccattgatagaaaatatcacgctttccattcttgaagtactataagtaattatagtataatgtaaaggtttatatattcaatattttttataaaaaaatcatttcgacattaattcctttttaaatttccgtctatcatctatagaaacatattctatgaatttataaaatgcttttacgtgtcctatcgtaggcgatagaaccgctaaaaagcctattgaatttctacaaaagaatctattatatggtatagggagagtataaaacattaaatgcccgtacttattaaagtattcagtagccaatcctaactctttcgaatacttattaatggctcttgttctgtacgaatctatttttttgaacaacggacctagtggtatatcttgttctatgtatctaaaataatgtctgactagatccgttagtttaatatcctcagtcatcttgtctagaatggcaaatctaactgcgggtttaggctttagtttagtttttatatctacatctatgtctttatctaacaccaaaaatataatagctaatattttattacaatcatccggatattcttctacgatctcactaactaatgtttctttggttatactagtatagtcactatcggacaaataaagaaaatcagatgatcgatgaataatacatttaaattcatcatctgtaagatttttgagatgtctcattaaaatattattagggtcagtactcattatcattaggcagctattacttattttattatttttcaccatatagatcaatcattagatcatcaaaatatgtttcaatcatcctaaagagtatggtgaatgactcttcccatctaatttctgaacgttcaccaatgtctctagccactttggcactaatagcgatcattcgcttagcgtcttctatattattaactggttgattcaatctatctagcaatggaccgtcggacagcgtcattctcatgttcttaatcaatgtacatacatcgccgtcatctaccaattcatccaacaacataagctttttaaaatcatcattataataggtttgatcgttgtcatttctccaaagaatatatctaataagtagagtcctcatgcttagtaatttaactattttagttaacaactattttttatgttaaatcaattagtacaccgctatgtttaatacttattcatattttagtttttaggattgagaatcaatacaaaaattaatgcatcattaattttagaaatacttagtttccacgtagttaatgaaacatttgaactcatcgtacaagacgttctcgtacaggacgtaactataaaccggtttatatttgttcaagatagatacaaatccgataactttttttacgaattctacgggatccactttaaaagtgtcataccgggttctttttatttttttaaacagatcaatggtgtgatgttgattaggtcttttacgaatttgatatagaatagcgtttacatattctccataatggtcaatcgccatttgttcgtatgtcataaattctttaattatatgacactgtgtattgtttagttcatccttgttcattgttaggaatctatccaaaatggcaattatactagaactataggtgcgttgtatacacatattgatgtgtctgtttatacaatccatgatatttggatccatgctactaccttcgggtaaaattgtagcatcatataccatttctagtactttaggttcattattatccattgcagaggacgtcatgatcgcatcctaaaaaaatatattatttttatgttattttgttaaaaataatcatcgaatacttcgtaagatactccttcatgaacataatcagttacaaaacgtttatatgaagtaaagtatctacgatttttacaaaagtccggatgcataagtacaaagtacgcgataaacggaataataatagatttatctagtctatctttttctatagctttcatagttagatacatggtctcagaagtaggattatgtaacatcagcttcgataaaatgactgggttatttagtcttacacattcgctcatacatgtatgaccgttaactacagagtctacactaaaatgattgaacaatagatagtctaccattgtttcgtattcagatagtacagcgtagtacatggcatcttcacaaattatatcattgtctaatagatatttgacgcatcttatggatcccacttcaacagccatcttaaaatcggtaaaatcatattgctttcctttatcattaataatttctaaaacatcatctctatcataaaagatacaaatattaactgtttgatccgtaataacattgctagtcgatagcaatttgttaataagatgcgctgggctcaatgtcttaataagaagtgtaagaggactatctccgaatttgttttgtttattaacatccgttgatggaagtaaaagatctataatgtctacattcttgactgttttagagcatacaatatggagaggtgtatttccatcatgatctggttttgagggactaattcctagtttcatcatccatgagattgtagaagcttttggattgtctgacataagatgtctatgaatatgatttttgccaaatttatccactatcctggcttcgaatccgatggacattatttttttaaacactctttctgaaggatctgtacacgccaacaacggaccacatccttcttcatcaaccgagttgttaatcttggctccatactgtaccaataaatttattctctctatgacttcatcatctgttcccgagagataatatagaggcgttttatgctgtttatcacacgcgtttggatctgcgccgtgcgtcagcagcatcgcgactattctattattattaattttagaagctatatgcaatggataatttccatcatcatccgtctcatttggagagtatcctctatgaagaagttcttcgacaaatcgttcatctagtcctttaattccacaatacgcatgtagaatgtgataattatttccagaaggttcgatagcttgtagcatattcctaaatacatctaaatttttactattatatttggcataaagagatagataatactcggccgacataatgttgtccattgtagtataaaaattaatatttctatttctatttctgtatatttgcaacaatttactctctataacaaatatcataacttagttcttttatgtcaagaaggcactggtttagttcatctataaatgtcacgccataactaccacgcatgctatactcagaattatgataaagatatttatccttggggtgtaggtaatggggattaatctttgttggatcagtctctaagttaacacatgtcacacatgatccatttatagttatatcacacgatgatgatttatgaattgattccggaagatcgctatcgtattttgtggttccacaattcatttccatacatgttattgtcacactaatattatgatgaactttatctagccgctgagtggtaaacaacagaacagatagtttattatctttaccaacaccctcagccgctgccacaaatctctgatccgtatccatgatggtcatgtttatttctagtccgtatccagtcaacactatgttagcatttctgtcgatatagctttcactcatatgacactcaccaataatagtagaattaatgtcgtaatttacaccaatagtgagttcggcggcaaagtaccaataccggtaatcttgtcgaggaggacatatagtattcttgtattctaccgaatacccgagagatgcgatacaaaagagcaagactaatttgtaaaccatcttactcaaaatatgtaacaatagtacgatgcaatgagtaagacaataggaaatctatcttatatacacataattattctatcaattttaccaattagttagtgtaatgttaacaaaaatgtgggagaatctaattagtttttctttacacaattgacgtacatgagtctgagttccttgtttttgctaattatttcatccaatttattattcttgactatatcgagatcttttgtataggagtcagacttgtattcaacatgcttttctataatcattttagctatttcggcatcatccaatagtacattttccagattagcagaatagatattaatgtcgtatttgaacagagcctgtaacatctcaatgtctttattatctatagccaatttaatgtccggaatgaagagaagggaattattggtgtttgtcgacgtcatatagtcgagcaagagaatcatcatatccacgtgtccattttttatagtggtgtgaatacaactaaggagaatagccagatcaaaagtagatggtatttctgaaagaaagtatgatacaatacttacatcattaagcatgacggcatgataaaatgaagttttccatccagttttcccatagaacatcagtctccaatttttcttaacaaacagttttaccgtttgcatgttaccactatcaaccgcataatacaatgcagtgtttcccttgtcatcaaattgtgaatcatccagtccactgaatagcaaaatctttactattttggtatcttccaatgtggctgcctgatgtaatggaaattcattctctagaagatttttcaatgctccagcgttcaacaacgtacatactagacgcacgttattatcagctattgcataatacaaggcactatgtccatggacatccgccttaaatgtatctttactagagagaaagcttttcagctgcttagacttccaagtattaattcgtgacagatccatgtctgaaacgagacgctaattagtgtatattttttcattttttataattttgtcatattgcaccagaattaataatatctctaatagatctgattagtagatacatggctatcgcaaaacaacatatacacatttaataaaaataatatttattaagaaaattcagatttcacgtacccatcaatataaataaaataatgattccttacaccgtacccatattaaggagattccaccttacccataaacaatataaatccagtaatatcatgtctaatgatgaacacaaatggtgtattaaattccagtttttcaggagatgatctcgccgtagctaccataatagtagatgcctctgctacagttccttgttcgtcgacatctatctttgcattctgaaacattttataaatatataatgggtccctagtcatatgtttaaacgacgcattatctggattaaacatactaggagccatcatttcggctatcgacttaatatccctcttattttcgatagaaaatttagggagtttaagattgtacactttattccctaattgaaacgaccaatagtctaattttgcagccgtaatagaatctgtgaaatgggtcatattatcacctattgccaggtacatactaatattagcatccttatacggaaggcgtaccatgtcatattctttgtcatcgattgtgattgtatttccttgcaatttagtaactacgttcatcatgggaaccgttttcgtaccgtacttattagtaaaactagcattgcgtgttttagtgatatcaaacggatattgccatgtacctttaaaatatatagtattaatgattgcccatagagtattattgtcgagcatattagaatctactacattagacataccggatctacgttctactatagaattaattttattaaccgcatctcgtctaaagtttaatctatataggccgaatctatgatattgttgataatacgacggtttaatacacacagtattatctacgaaactttgataagttagatcagtgtacgtatatttagatgttttcagcttagctaatcctgatattaattctgtaaatgctggacccagatctctttttctcaaatccatagtcttcaataattctattctagtattacctgatgcaggcaatagcgacataaacatagaaaacgaatagccaaacggcgagaagacaatattatcatcttgaatatttttatacgctactataccggcattggtaaatccttgcagacgataggtagacgctgaacacgttaacgatagtatcaataacgcaatcatgattttatggtattaataattaaccttatttttatgttcggtataaaaaaattattgatgtctacacatccttttgtaattgacatctatatatccttttgtataatcaactctaatcactttaacttttacagttttccctaccagtttatccctatattcaacatatctatccatatgcatcttaacactctctgccaagatagcttcagagtgaggatagtcaaaaagataaatatatagagcataatccttctcgtatactctgccctttattacatcgcccgcattgggcaacgaataacaaaatgcaagcatcttgttaacgggctcgtaaattgggataaaaattatgtttttatatctattttattcaagagaatattcaggaatttctttttccggttgtatctcgtcgcagtatatatcatttgtacattgtttcatattttttaatagtttacaccttttagtaggactagtatcgtacaattcatagctgtattttgaattccaatcacgcataaaaatatcttccaattgttgacgaagacctaatccatcatccggtgtaatattaatagatgctccacatgtatccgtaaagtaatttcctgtccaatttgaggtacctatataggccgttttatcggttaccatatatttggcatggtttaccctagaatacggaatgggaggatcagcatctggtacaataaatagctttacttctatatctatgtttttagattttagcatagcgatagatcttaaaaagtttctcatgataaacgaagatcgttgccagcaactaatcaatagcttaacggatacttgtctgtctatagcggatcttcttaattcatcttctatataaggccaaaacaaaattttacccgccttcgaataaataatagggataaagttcataacagatacataaacgaatttactcgcatttctaatacatgacaataaagcggttaaatcattggttctttccatagtacatagttgttgcggcgcagaagcaataaatacagagtgtggaacaccacttacgttaatactaagaggatgatctgtattataatacgacggataaaagtttttccaattatatggtagattgttaactccaagataccagtatacctcaaaaatttgagtgagatccgctgccaagttcctattattgaagatcgcaatacccaattctttgacctgagttagtgatctccaatccatgttagcgcttcctaaataaatatgtgtattatcagatatccaaaattttgtatgaagaactcctcctaggatatttgtaatatctatgtatcgtacttcaactccggccatttgtagtctttcaacatcctttaatggtttgttagatttattgacggctactctaactcttactcctcttttgggtaattgtacaatctcgtttaatattatcgtgccgaaattcgtacccacttcatccgataaactccaataaaaagatgatatatctagtgtttttgtggtattggatagaatttccctccacatgttaaatgtagacaaatatactttatcaaattgcatacctataggaatagtctctgtaatcactgcgattgtattatccggattcattttatttgttaaaaaataatcctatatcacttcactctattaaaaatccaagtttctatttctttcatgactgattttttaacttcatccgtttccttatgaagatgatgtttggcaccttcataaatttttatttctctattacaatttgcatgttgcatgaaataatatgcacctaaaacatcgctaatctcattgtttgttccctggagtatgagagtcgggggggtgttaatcttggaaattatttttctaaccttgttggtagccttcaagacctgactagcaaatccagccttaattttttcatgattgattaatgggtcgtattggtatttataaactttatccatatctctagatactgattctggacatagctttccgactggcgcatttggtgtgatggttcccataagtttggcagctagcagattcagttttgaaacagcatctgcattaactagaggagacattagaatcattgctgtaaacaagtttggattatcgtaagaggctagtatagaaattgttgctcccatggaatgacccaataagtagatttaatagttaccacgtgctgtaccaaagtcatcaatcatcattttttcaccattacttcttccatgtccaatatgatcatgtgagaatactaaaattcctaacgatgatatgttttcagctagttcgtcataacgtccagaatgtttaccagctccatgacttatgaatactaatgccttaggatatgtaataggtttccaatatttacaatatatgtaatcattgtccagattgaacatacagtttgcactcatgattcacgttatataactatcaatattaacagttcgtttgatgatcatattatttttatgttttattgataattgtaaaaacatacaattaaatcaatatagaggaaggagacggatactgtcttttgtgagatagtcatggcgactaaatcagattatgaggatgctgttttttactttgtggatgatgataaaatatgtagtcgcgactccatcatcgatctaatagatgaatatatcacgtggagaaatcatgttatagtgtttaacaaagatattaccagttgtggaagactgtacaaggaattgatgaagttcgatgatgccgctatacagtactatggtattgataaaattaatgagattgtcgaagctatgagcgaaggagaccactacatcaattttacaaaagtccatgatcaggaaagtttattcgctaccataggaatatgtgctaaaatcactgaacattggggatacaaaaagatttcagaatctagattccaatcattgggaaacattacagatctgatgaccgacgataatataaacatcttgatactttttctagaaaaaaaattgaattgatgatataggggtcttcataacgcataattattacgttagcattctatatccgtgttaaaaaaaattatcctatcatgtatttgagagttttatatgtagcaaacatgatagctgtgatgccaataagctttagatattcacgcgtgctagtgttagggatggtattatctggtggtgaaatgtccgttatataatctacaaaacaatcatcgcatatagtatgcgatagtagagtaaacatttttatcgtttctactgggttcatacatcgtctacccaattcggttatgaatgaaattgtcgccaatcttacacccaaacccttgttatccattagcatagtattaacttcgttatttatgtcataaactgtaaatgattctgtagatgccatatcatacatgatattcatgtccctattataatcattactaactttatcacaatatatgttgataatatctatatatgatctagtctttgtgggcaactgtctatacaagtcgtctaaacgttgtttactcatatagtatcgaacagccatcattacatggtcccgttccgttgatagataatcgagtatgttagtggacttgtcaaatctatataccatattttctggaagtggatatacatagtcgtgatcaacattattgctagcctcatcttctatatcctgtactataccattatctatatcatctacataatctacgatattattatacataaacatcgacaacatactattgtcaattatctaagtcctgttgatccaaacccttgatctcctctatctgtactatctagagattgtacttcttccagttctggataatatatacgttgatagattagctgggctattctatcccccgtatttacattaaacgtacattttccattattaataagaataactcctatgtttcccctataatcttcgtctattacaccgcctcctatatcaatgccttttagggacagaccagacctaggagctattctaccatagcagaacttaggcatggacatactaatatctgtcttaattaactgtcgttctccaggagggatagtataatcgtaagcgctatataaatcatatccggcggcgtaaggtgattgcctagtaggagatttagctctgttagtttccttaacaaatctaactggtgagttaatattcatgttgaacataaaactaatattttatttcaaaattatttaccatcccatatattccatgaataagtgtgatgattgtacacttctatagtatctatatacgattcacgataaaatcctcctatcaatagcagtttattatccactatgatcaattctggattatccctcggataaataggatcatctatcagagtccatgtattgctggattcacaataaaattccgcatttctaccaaccaagaataaccttctaccgaacactaacgcgcatgatttataatgaggataataagtggatggtccaaactgccactgatcatgattgggtagcaaatattctgtagttgtatcagtttcagaatgtcctcccattacgtatataacattgtttatagatgccactgctggattacatctaggtttcagaagactcggcatattaacccaagcagcatccccgtggaaccaacgctcaacagatgtgggatttggtagacctcctactacgtataatttattgttagcgggtatcccgctagcatacagtctggggctattcatcggaggaattggaatccaattgtttgatatataatttacagctatagcattgttatgtatttcattgttcatccatccaccgatgagatatactacttctccaacatgagtacttgtacacatatggaatatatctataatttgatccatgttcataggatactctatgaatggatacttgtatgatttgcgtggttgtttatcacaatgaaatattttggtacagtctagtatccattttacattatttatacctctgggagaaagataatttgacctgattacatttttgataaggagtagcagatttcctaatttatttcttcgctttatataccacttaatgacaaaatcaactacataatcctcatctggaacatttagttcatcgctttctagaataagtttcatagatagataatcaaaattgtctatgatgtcatcttccagttccaaaaagtgtttggcaataaagtttttagtatgacataagagattggatagtccgtattctatacccatcatgtaacactcgacacaatattcctttctaaaatctcgtaagataaagtttatacaagtgtagatgataaattctacagaggttaatatagaagcacgtaataaattgacgacgttatgactatctatatatacctttccagtatatgagtaaataactatagaagttaaactgtgaatgtcaaggtctagacaaacccttgtaactggatctttatttttcgtgtatttttgacgtaaatgtgtgcgaaagtaaggagataactttttcaatatcgtagaattgactattatattgccacctatagcatcaataattgttttgaatttcttagtcatagacaatgctaatatattcttacagtacacagtattaacaaatatcggcatttatgtttctttaaaagtcaacatctagagaaaaatgattatctttttgagacataactcccattttttggtattcacccacacgtttttcgaaaaaattagtttttccttccaatgatatattttccatgaaatcaaacggattggtaacattataaatttttttaaatcccaattcagaaatcaatctatccgcgacgaattctatatatgttttcatcatttcacaattcattcctataagtttaactggaagagccgcagtaagaaattcttgttcaatggatactgcatctgttataatagatctaacggtttcttcactcggtggatacaataaatgtttaaacatcaaacatgcgaagtcgcagtgtagaccctcgtctctactaattagttcgttggaaaacgtgagtccgggcattaggccacgctttttaagccaaaatatggaagcgaatgatccggaaaagaagattccttctactgcagcaaaggcaataagtctctctccataaccggcgctgtcatgtatccacttttgagcccaatcggccttcttttttacacaaggcattgtttctatggcattaaagagatagtttttttcattactatctttaacataagtatcgatcaaaagactatacatttccgaatgaatgttttcaatggccatctgaaatccgtagaaacatctagcctcggtaatctgtacttctgtacaaaatcgttccgccaaattttcattcactattccgtcactggctgcaaaaaacgccaatacatgttttataaaatatttttcgtctggtgttagtttattccaatcattgatatctttagatatatctacttcttccactgtccaaaatgatgcctctgcctttttatacatgttccagatgtcatgatattggattgggaaaataacaaatctatttggatttggtgcaaggatgggttccataactaaattaacaatatcaataaattttttttcagttatctatatgcctgtacttggattttttgtacatcgatatcgccgcaatcactacaataattacaagtattattgatagcattgttattagtactatcataattaaattatcgacattcatgggtgctgaataatcgttattatcatcattatcattttgtaattgtgacatcatactaaataaatcgtttgcgagattgttgtgggaagcgggcatggaggatgcattatcattattatttaacgccttccatttggattcacaaatatggcgcgcgttcaacattttatggaaactataattttgtgaaaacagataacaagaaaactcgtcatcgttcaaatttttaacgatagtaaaccgattaaacgtcgagctaatttctaacgctagcgactctgttggatatgggtttccagatatatatcttttcagttcccctacgtatctataatcatctgtaggaaatggaagatatttccatttatctactgttcctaatatcatatgtggtggtgtagtagaaccattaagcgcgaaagatgttatttcgcatcgtattttaacttcgcaataatttctggttagataacgcactctaccagtcaagtcaatgatattagcctttacagatatattcatagtagtcgtaacgatgactccatcttttagatgcgatactcctttgtatgtaccagaatcttcgtacctcaaactcgatatatttaaacaagttaatgagatattaacgcgttttatgaatgatgatatataaccagaagttttatcctcggtggctagcgctataaccttatcattataataccaactagtgtgattaatatgtgacacgtcagtgtgggtacaaatatgtacattatcgtctacgtcgtattcgatacatccgcatacagccaacaaatataaaatgacaaatactctaacgccgttcgtacccatcttgatgcggtttaataaatgttttgatttcaatttattgtaaaaaaagattcggttttatactgttcgatattctcattgcttatattctcatctatcatctccacacagtcaaatccgtggttagcatgcacctcatcaaccggtaaaagactatcggactcttctatcattataactctagaatatttaatttggtcattattaatcaagtcaattatcttatttttaacaaacgtgagtattttactcattttttataaaaacttttagaaatatacagactctatcgtgtgtctatatcttctttttatatccaatgtatttatgtctgatttttcttcatttatcatatataatggtccaaattctacacgtgcttcggattcatccagatcattaaggttcttataattgtaacatccttctcttccctcttctacatcttccttcttattcttattcttagcgtcacagaatctaccacagcaggatcccatgacgagcgtcatattaaactaatccattttcaattataatatatgattagtaatgaccattaaaataaaaaatattcttcataaccggcaagaaagtgaaaagttcacattgaaactatgtcagtagtatacatcatgaaatgatgatatatatatactctattttggtggaggattatatgatataattcgtggataatcattcttaagacacatttcttcattcgtaaatcttttcacgttaaatgagtgtccatattttgcaatttcttcatatgatggcggtgtacgtggacgaggctgctcctgttcttgttgtggtcgccgactgtcgtgtttgcgtttatccctccattatcgcgattgcgtagatggagtactattatataccttgtaattaaatttttttattaattaaacgtataaaaacgttccgtatctgtatttaagagccagatttcgtctaatagaacaaatagctacagtaaaaataactagaataattgctacacccactagaaaccacggatcgtaatacggcaatcggttttcgataataggtggaacgtatattttatttaaggacttaacaattgtctgtaaaccacaatttgcttccgcggatcctgtattaactatctgtaaaagcatatgttggccgggcggagccgaacattctccgatatccaatttctgtatatctataatattattaacctccgcatacgcattacagttcttttctagcttggataccgcactaggtacatcgtctagatctattcctatttcctcagcgatagctcttctatccttttccggaagcaatgaaatcacttcaataaatgattcaaccatgagtgtgaaactaagtcgagaattactcatgcatttgttagttattcggagcgcgcaatttttaaactgtcctataacctctcctatatgaatagcacaagtgacattagtagggatagaatgttgagctaatttttgtaaataactatctataaaaagattatacaaagttttaaactctttagtttccgccatttatccagtctgagaaaatgtctctcataataaatttttccaagaaactaattgggtgaagaatggaaacctttaatctatatttatcacagtctgttttggtacacatgatgaattcttctaatgccgtactaaattcgatatctttttcgatttctggatatgtttttaataaagtatgaacaaagaaatggaaatcgtaataccagttatgtttaactttgaaattgttttttattttcttgttaatgattccagccacttgggaaaagtcaaagtcgtttaatgccgatttaatacgttcattaaaaacaaactttttatcctttagatgaattattattggttcattggaatcaaaaagtaagatattatcgggtttaagatctgcgtgtaaaaagttgtcgcagcatggtagttcgtagattttaatgtataacagagccatctgtaaaaagataaactttatgtattgtaccaaagatttaaatcctaatttgatagctaactcggtatctactttatctgccgaatacagtgctaggggaaaaattataatgtttcctctttcgtattcgtagttagttctcttttcatgttcgaaaaagtgaaacatgcggttaaaatagtttataacattaatattactgttaataactgccgggtaaaagtgggatagtaatttcacgaatttgatactgtcctttctctcgttaaacgcctttagaaaaactttagaagaatatctcaatgatagttcctgaccatccatagtttgtatcaataatagcaacatatgaagaacacgtttatacagagtatgtaaaaatgttaatttatagtttaatcccatggcccacgcacacacgattaattttttttcatctccctttagattgttgtatagaaatttgggtactgtgaactccgccgtagtttccatgggactatataattttgtggcctcgaatacaaattttactacatagttatctatcttaaaaactataccatatcctcctgtagatatgtgataaaaatcgtcgtttataggataaaatcgtttatccttttgttggaaaaaggatgaattaatgtaatcattctcttctatctttagtagtgtttccttattaaaattcttaaaataatttaacaatctaactgacggagcccaattttggtgtaaatctaattgggacattatattgttaaaatacaaacagtctcctaatataacagtatctgataatctatggggagacatccattgatattcaggggatgaatcattggcaacacccatttattgtacaaaaagccccaatttacaaacgaaagtccaggtttgatagagacaaactattaactattttgtctctgtttttaacacctccacagtttttaatttctttagtaatgaaattattcacaatatcagtatcttctttatctaccagagattttactaacttgataaccttggctgtctcattcaatagggtagtaatatttgtatgtgtgatattgatatctttttgaattgtttcttttagaagtgattctttgatggtgccagcatacgaattacaataatgcagaaactcggttaacatgcaggaattatagtaagccaattccaattgttgcctgtgttgtattagagtgtcaatatgagcaatggtgtccttgcgtttctctgatagaatgcgagcagcgattttggcgttatcatttgacgatatttctggaatgacgaatcctgtttctactaactttttggtaggacaaagtgaaacaatcaagaagatagcttctcctcctatttgtggaagaaattgaactcctctagatgatctactgacgatagtatctccttgacagatattggaccgaattacagaagtacctggaatgtaaagccctgaaaccccctcattttttaagcagattgttgccgtaaatcctgcactgtgaccaagatagagagctcctttggtgaatccatctctatgtttcagtttaaccaagaaacagtcagctggtctaaaatttccatctctatctaatacagcatctaacttgatgtcaggaactatgaccggtttaatgttatatgtaacattgagtaaatccttaagttcataatcatcactgtcatcagttatgtacgatccaaacaatgtttctactggcatagtggatacgaagatgctatccatcagaatgtttccctgattagtattttctatatagctattcttctttaaacgattttccaaatcagtaactatgttcatttttttaggagtaggacgcctagccagtatggaagaggattttctagatcctctcttcaacatctttgatctcaatggaatgcaaaaccccatagtgaaacaaccaacgataaaaataatattgtttttcactttttataattttaccatctgactcatggattcattaatatctttataagagctactaacgtataattctttataactgaactgagatatatacaccggatctatggtttccataattgagtaaatgaatgctcggcaataactaatggcaaatgtataaaacaacgaaattatactagagttgttaaagttaatattttctatgagctgttccaataaattatttgttgtgactgcgttcaagtcataaatcatcttgatactatccagtaaacagtctttaagttctggaatattatcatcccattgtaaagcccctaattcgactatcgaatatcctgctctgatagcagtttcaatatcgacggacgtcaatactgtaataaaggtggtagtattgtcatcatcgtgataaactacgggaatatggtcgttagtaggtacggtgactttacacaacgcgatatataactttccttttgtaccatttttaacgtagttgggacgtcctgcagggtattgttttgaagaaatgatatcgagaacagatttgatacgatatttgttggattcctgattattcactataatataatctagacagatagatgattcgataaatagagaaggtatatcgttggtaggataatacatccccattccagtattctcggatactctattgatgacactagttaagaacatgtcttctattctagaaaacgaaaacatcctacatggactcattaaaacttctaacgctcctgattgtgtctcgaatgcctcgtacaaggatttcaaggatgccatagattctttgaccaacgatttagaattgcgtttagcatctgatttttttattaaatcgaatggtcggctctctggtttgctaccccaatgataacaatagtcttgtaaagataaaccgcaagaaaatttatacgcatccatccaaataaccctagcaccatcggatgatattaatgtattattatagattttccatccacaattattgggccagtatactgttagcaacggtatatcgaatagattactcatgtaacctactagaatgatagttcgtgtactagtcataatatctttaatccaatctaagaaatttaaaattagattttttacactgttaaagttaacaaaggtattacccggatacgtggatatcatatatggcattggtccattatcagtaatagctccataaactgatacggcgatggtttttatatgtgtttgatctaacgaggaagaaattcgcgcccacaattcatctctagatatgtatttaatatcaaacggtaacacatcaatttcgggacgcgtatatgtttctaaatttttaatccaaatataatgatgacctatatgccctattatcatactgtcaactatagtacacctagagaacttacgatacatctgtttcctataatcgttaaattttacaaatctataacatgctaaaccttttgacgacaaccattcattaatttctgatatggaatctgtattctcgataccgtattgttctaaagccagtgctatatctccctgttcgtgggaacgctttcgtataatatcgatcaacggataatctgaagtttttggagaataatatgactcatgatctatttcgtccataaacaatctagacataggaattggaggcgatgatcttaattttgtgcaatgagtcgtcaatcctataacttctaatattgtaatattcatcatcgacataacactatctatgttatcatcgtatattagtataccacggccttcttcatttcgtgccaaaataatatacagtcttaaataattacgcaatatctcaatagtttcataattgttagctgttttcatcaaggtttgtatcctgtttaacatgatggcgttctataacgtctctattttctatttttaattttttaaatttttaacgatttactgtggctagatacccaatctctctcaaatatttttttagcctcgcttacaagctgtttatctatactattaaaactgacgaatccgtgattttggtaatgggttccgtcgaaatttgccgaagtgatatgaacatattcgtcgtcgactatcaacaattttgtattattctgaatagtgaaaaccttcacagatagatcattttgaacacacaacgcgtctagacttctggcggttgccatagaatatacgtcgttcttatcccaattaccaactagaagtctgatcttaactcctctattaatggctgcttctataatggagttgtaaatgtcaggccaatagtagctattaccgtcgacacgtgtagtgggaactatggccaaatgttcaatatctatactagtcttagccgacttgagtttatcaataactacatcagtgtctagatctctagaatatcccaataggtgttctggagaatcagtaaagaacactccacctataggattcttaatatgatacgcagtgctaactggcagacaacaagccgcagagcataaattcaaccatgaattttttgcgctattaaaggctttaaaagtatcaaatcttctacgaagatctgtggccagcgggggataatcagaatatacacctaacgttttaatcgtatgtatagatcctccagtaaatgacgcgtttcctacataacatctttcatcatctgacacccaaaaacaaccgagtagtagtcccacattattttttttatctatattaacggttataaaatttatatccgggcagtgactttgtagctctcccagatttcttttccctcgttcatctagcaaaactattattttaatccctttttcagatgcctcttttagtttatcaaaaataagcgcgcccctagtcgtactcagaggattacaacaaaaagatgctatgtatatatatttcttagctagagtgataatttcgttaaaacattcaaatgttgttaaatgatcggatctaaaatccatattttctggtagtgtttctaccagcctacattttgctcccgcaggtaccggtgcaaatggccacatttagttaacataaaaacttatacatcctgttctatcaacgattctagaatatcatcggctatatcgctaaaattttcatcaaagtcgacatcacaacctaactcagtcaatatattaagaagttccatgatgtcatcttcgtttatttctatatccgtatccattgtagattgttgaccgattatcgagtttaaatcattactaatactcaatccttcagaatacaatctgtgtttcattgtaaatttataggcggtgtatttaagttggtagattttcaattatgtatcaaagaagtgtctgctttatggccttataagctccctcaagctcaacagctgctcccaagaaatcggcttcctttttatagaagttattgtacctggatcgagagttaatttccctgtcgttaaccatatccccgatagtcttgactatgcatttcaaggcaatgagatcgttttcttcgacgaattccttcgctttatttacaaattttttagaagcctcaacaaactttgaatctacaaacttactactgattacgtcaaatgactctatgtacgcaagagccacggacttgcggagcttctcgtaggaatcggcaacatgtcgagcattagacacatcgttatcgacggcctggtccagttctatagcaaagtcatcgatcagtttgctcaggaacattggtttgtactcttcgatgatcttttccaattctttgaacttattgactatcttgttatcctttttaagaatggatatggcttggtttactttagatttatcggagctggtgccctcgctgtatgtcattatataggtcattatatcgttgtacgccccggtatattcactgtagatagcgtccaatttaatagagtaatatttggctttttccacgaaaattttaagttcatcaatatttctttgattaagtctagacacatcgcaagaaccacctccccctgatcctccgccaccggaccctcctccaccatatagcaacagtagttcttgctcctccttgattctagcatcctcttcattattttcttctacgtacataagcatgtccaatacgttagacaacacaccgacgatggcggccgccacagacacgaatatgactagaccgatgaccatttaaaaacccctctctagctttcacttaaactgtatcgattattcttttagaacatgtataatataaaaacattattctatttcgaatttaggcttccaaaaatttttcatccgtaaaccgataataatatatatagacttgttaatagtcggaataaatagattaatgcttaaactatcatcatctccacgattagagatacaatatttacattctttttgctgtttcgaaactttatcaatacacgttaatacaaacccaggaaggagatattgaaactgaggctgttgaaaatgaaacggtgaatacaataattcagataatgtaaaatcatgattccgtattctgatgatattagaactgctaatggatgtcgatggtatgtatctaggagtatctattttaacaaagcatcgatttgctaatatacaattatcattttgattaattgttattttattcatattcttaaaaggtttcatatttatcaattcttctacattaaaaatttccatttttaatttatgtagccccgcaatactcctcattacgtttcattttttgtctataatatccattttgttcatctcggtacatagattatccaattgagaagcgcatttagtagttttgtacattttaagtttattgacgaatcgtcgaaaactagttatagttaacattttattatttgataccctgatattaatacccctgccgttactattatttataactgatgtaacccacgtaacattagaattaattatcgatagtaatgcatcgacgcttccaaaattgtctattataaactcaccgataatttttttattgcatgttttcatattcattaggattatcaaatctttaatcttattacgattgtatgcgttgatattacaagacgtcattctaaaagacggaggatctccatcaaatgccagacaatcacgtacaaagtacatggaaataggttttgttctattgcgcatcatagattcatatagaacacccatagaaatactaatttgttttactctataaaatactaatgcatctatttcatcgttttgtataacgtctttccaagtgccaaattccaaatttttttcattgatagtaccaaattcttctatctctttaactacttgcatagataggtaattacagtgatgcctacatgccgttttttgaaactgaatagatgcgtctagaagcgatgctacactagtcacaatcaccactttcatatttagaatatatgtatgtaaaaatatagtagaatttcattttgtttttttctatgctataaatgaattctcattttgcatctgctcatactccgttttatatcaataccaaagaaggaagatatctggttctaaaagccgttaaagtatgcgatgttagaactgtagaatgcgaaggaagtaaagcttcctgcgtactcaaagtagataaaccctcatcgcccgcgtgtgagagaagaccttcgtccccgtccagatgcgagagaatgaataaccctggaaaacaagtcccgtttatgaggacggacatgctacaaaatatgttcgcggctaatcgcgataatgtagcttctagacttttgtcctaaaatactattatatccttttcgatattaataaatccgtgtcgtccaggttttttatctctttcagtatgtgaatagataggtattttatctctattcatcatcgaatttaagagatccgataaacattgtttgtattctccagatgtcagcatctgatacaacaatatatgtgcacataaacctctggcacttatttcatgtaccttccccttatcactaaggagaatagtatttgagaaatatgtatacatgatattatcatgaattagatatacagaatttgtaacactctcgaaatcacacgatgtgtcggcgttaagatctaatatatcactcgataacacattttcatctagatacactagacattttttaaagctaaaatagtctttagtagtgacagtaactatgcgattattttcatcgatgatacatttcatcggcatattattacgcttaccatcaaagactataccatgtgtatatctaacgtattctagcatggttgccatacgtgcattaaacttttcaggatctttggatagatcttccaatctatctatttgagaaaacatttttatcatgttcaatagttgaaacgtcggatccactatatagatattatctataaagattttaggaactacgttcatggtatcctggcgaatattaaaactatcaatgatatgattatcgttttcatcttttatcaccatatagtttctaagatatgggattttacttaatataatattatttcccgtgataaattttattagaaaggccaaatctataagaaaagtcctagaattagtctgaagaatatctatatcgccgtaccgtatatttggattaattagatatagagaatatgatccgtaacatatacaacttttattatggcgtctaagatattcttccatcaacttattaacatttttgactagggaagatacattatgacgtcccattacttttgccttgtctattactgcgacgttcatagaatttagcatatctcttgccaattcttccattgatgttacattataagaaattttagatgaaattacatttggagctttaatagtaagaactcctaatatgtccgtgtatgtggtcactaatacagattgtagttctataatcgtaaataatttacctatattatatgtttgagtctgtttagaaaagtagctaagtatacgatcttttatttctgatgcagatgtatcaacatcggaaaaaaatctttttttattcttttttactaaagatacaaatatgtctttgttaaaaacagttattttctgaatatttctagcttgtaattttaacatatgatattcgttcacactaggtactctgcctaaataggtttctataatctttaatgtaatattaggaagagtattctgatcaggattcctattcattttgaggatttaaaactctgattattgtctaatatggtctcaacacaaactttttcacagagcgatagagtttttgataactcgtttttcttaagaaatataaaactactgtttccagagctcgctctatcttttattttatctaattcgatacaaactcctgatactggttcagaaagtaattcattaattttcagtcctttatagaagatatttaatatagataatacaaaattttcagttcttgatatcgatctgattgatcctagaactagatatattaataacgtgctcattaggcagtttatggcagcttgataattagatatagtatattccagttcatatttattagataccgcattgcccagattttgatattctatgaattcctctgaaaataaatccaaaataactagacattctattttttgtggattagtgtactctcttccctctatcatgttcactactggtgtccacgatgataaatatctagagggaatataatatagtccataggatgccaatctagcaatgtcgaataactgtaatttgattcttcgttcttcattatgaattgattcttgaggtataaacctaacacaaattatattattagacttttcgtatgtaatgtctttcatgttataagtttttaatcctggaatagaatctattttaatgaggcttttaaacgcagagttctccaacgagtcaaagcataatactctgttgtttttcttatatacgatgttacgattttcttctttgaatggaataggtttttgaattagtttataattacaacataatagataaggaagtgtgcaaatagtacgcggaaaaaacataatagctcccctgttttcatccatggttttaagtaaatgatcactggcttctttagtcaatggatattcgaacattaaccgtttcatcatcattggacagaatccatatttcttaatgtaaagagtgatcaaatcattgtgtttattgtaccatcttgttgtaaatgtgtattcggttatcggatctgctcctttttctattaaagtatcgatgtcgatctcgtctaagaattcaactatatcgacatatttcatttgtatacacataaccattactaacgtagaatgtataggaagagatgtaacgggaacagggtttgttgattcgcaaactattctaatacataattcttctgttaatacgtcttgcacgtaatctattatagatgccaagatatctatataattattttgtaagatgatgttaactatgtgatctatataagtagtgtaataattcatgtatttcgatatatgttccaactctgtctttgtgatgtctagtttcgtaatatctatagcatcctcaaaaaatatattcgcatatattcccaagtcttcagttctatcttctaaaaaatcttcaacgtatggaatataataatctattttacctcttctgatatcattaatgatatagtttttgacactatcttctgtcaattgattcttattcactatatctaagaaacggatagcgtccctaggacgaactactgccattaatatctctattatagcttctggacataattcatctattataccagaattaatgggaactattccgtatctatctaacatagttttaagaaagtcagaatctaagacctgatgttcatatattggttcatacatgaaatgatctctattgatgatagtgactatttcattctctgaaaattggtaactcattctatatatgctttccttgttgatgaaggatagaatatactcaatagaatttgtaccaacaaactgttctcttatgaatcgtatatcatcatctgaaataatcatgtaaggcatacatttaacaattagagacttgtctcctgttatcaatatactattcttgtgataatttatgtgtgaggcaaatttgtccacgttctttaattttgttatagtagatatcaaatccaatggagctacagttcttggcttaaacagatatagtttttctggaacgaattctacaacattattataaaggactttgggtagataagtgggatgaaatcctattttaattaatgcgatagccttgtcctcgtgcagatatccaaacgcttttgtgatagtatggcattcattgtctagaaacgctctacgaatatctgtgacagatatcatctttagagaatatactagtcgcgttaatagtactacaatttgtattttttaatctatctcaataaaaaaattaatatgtatgattcaatgtataactaaactactaactgttattgataactagaatcagaatctaatgatgacgtaaccaagaagtttatctactgccaatttagctgcattatttttagcatctcgtttagattttccatctgccttatcgaatactcttccgtcgatgtctacacaggcataaaatgtaggagagttactaggccccactgattcaatacgaaaagaccaatctctcctagtaatttggcagtactcattaataacggtgacagggttagcacctttccaatcaataatttttttagccggaataacatcatcaaaagacttatgatcctctctcattgatttttcgcgggatacatcatctattatggcgtcagccataacatcagcatccggcttatccgcctccgttgtcataaaccaacgaggaggaatatcgtcggagctgtacaccatagcactacgttgaagatcgtacagagctttattaacttctcgcttctccatattaagttgtctagttagttgtgcagcagtagctccttcgattccaatggttttaatagcctcacacacaatctctgcgttagaacgttcgtcgatatagattttagacatttttagagagaactaacacaaccagcaataaaactgaacctactttatcatttttttattcatcatcctctggtggttcgtcgttcctatcgaatgtggatctgattaacccgtcatctataggtgatgctggttctggagattctggaggagatggattattatctggaagaatctctgttatttccttgttttcatgtatcgattgcgttgtaacattaagattgcgaaatgctctaaatttgggaggcttaaagtgttgtttgcaatctctacacgcatgtctaactagtggaggttcgtcagcggctctagtttgaatcatcatcggcgtagtattcctacttttacagttaggacacggtgtattgtatttctcgtcgagaacgttaaaataatcgttgtaactcacatcctttattttatctatattgtattctactcctttcttaatgcattttataccgaataagagatagcgaaggaattctttttcggtgccgctagtacccttaatcatatcacatagtgttttatattccaaatttgtggcaatagacggtttatttctatacgatagtttgtttctggaatcctttgagtattctataccaatattattctttgattcgaatttagtttcttcgatattagattttgtattacctatattcttgatgtagtactttgatgatttttccatggcccattctattaagtcttccaagttggcatcatccacatattgtgatagtaattctcggatatcagtagcggctaccgccattgatgtttgttcattggatgagtaactactaatgtatacattttccatttataacacttatgtattaactttgttcatttatattttttcattattatgttgatattaacaaaagtgaatatatatgttaataattgtattgtggttatacggctacaatttcataatgagtggaagtcagtgtccgatgatcaatgacgatagctttactctgaaaagaaagtatcaaatcgatagtgcggagtcaacaataaaaatggataagaagaggataaagtttcagaatagagccaaaatggtaaaagaaataaatcagacaataagagcagcacaaactcattacgagacattgaaactaggatacataaaatttaagagaatgattaggactactactctagaagatatagcaccatctattccaaataatcagaaaacttataaactattctcggacatttcagccatcggcaaagcatcacagaatccgagtaagatggtatatgctctgctgctttacatgtttcccaatttgtttggagatgaccatagattcattcgttatagaatgcatccaatgagtaaaatcaaacacaagatcttctctcctttcaaacttaatcttattagaatattagtggaagaaagattctataataatgaatgcagatctaataaatggagaataattggaacacaagttgataaaatgttgatagctgaatctgataaatatacaatagatgcaaggtataacctaaaacccatgtatagaatcaagggaaaatctgaagaagataccctcttcatcaaacagatggtagaacaatgtgtgacatcccaggaattggtggaaaaagtgttgaagatactgtttagagatttgttcaagagtggagaatacaaagcatacagatacgatgatgatgtagaaaatggatttattggattggatacactaaaattaaacattgttcatgatatagttgaaccatgtatgcctgttcgtaggccagtggctaagatactgtgtaaagaaatggtaaataaatactttgagaatccgctacatattattggtaaaaatcttcaagagtgcattgactttgttagtgaataggcatttcatctttctccaatactaattcaaattgttaaattaataatggatagtataaatagttattagtgataaaatagtaaaaataattattagaataagagtgtagtatcatagataactctcttctataaaaatggattttattcgtagaaagtatcttatatacacagtagaaaataatatagattttttaaaggatgatacattaagtaaagtaaacaattttaccctcaatcatgtactagctctcaagtatctagttagcaattttcctcaacacgttattactaaggatgtattagctaataccaatttttttgttttcatacatatggtacgatgttgtaaagtgtacgaagcggttttacgacacgcatttgatgcacccacgttgtacgttaaagcattgactaagaattatttatcgtttagtaacgcaatacaatcgtacaaggaaaccgtgcataaactaacacaagatgaaaaatttttagaggttgccgaatacatggacgaattaggagaacttataggcgtaaattatgacttagttcttaatccattatttcacggaggggaacccatcaaagatatggaaatcatttttttaaaactgtttaagaaaacagacttcaaagttgttaaaaaattaagtgttataagattacttatttgggcatacctaagcaagaaagatacaggcatagagtttgcggataatgatagacaagatatatatactctatttcaacaaactggtagaatcgtccatagcaatctaacagaaacgtttagagattatatctttcccggagataagactagctattgggtgtggttaaacgaaagtatagctaatgatgcggatatcgttcttaatagacacgccattaccatgtatgataaaattcttagttatatatactctgagataaaacaaggacgcgttaataaaaacatgcttaagttagtttatatctttgagcctgaaaaagatatcagagaacttctgctagaaatcatatatgatattcctggagatatcctatctattattgatgcaaaaaacgacgattggaaaaaatattttattagtttttataaagctaattttattaacggtaatacatttattagtgatagaacgtttaacgaggacttattcagagttgttgttcaaatagatcccgaatatttcgataatgaacgaattatgtctttattctctacgagtgctgcggacattaaacgatttgatgagttagatattaataacagttatatatctaatataatttatgaggtgaacgatatcacattagatacaatggatgatatgaagaagtgtcaaatctttaacgaggatacgtcgtattatgttaaggaatacaatacatacctgtttttgcacgagtcggatcccatggtcatagagaacggaatactaaagaaactgtcatctataaaatccaagagtagacggctgaacttgtttagcaaaaacattttaaaatattatttagacggacaattggctcgtctaggtcttgtgttagatgattataaaggagacttgttagttaaaatgataaaccatcttaagtctgtggaggatgtatccgcattcgttcgattttctacagataaaaaccctagtattcttccatcgctaatcaaaactattttagctagttataatatttccatcatcgtcttatttcaaaggtttttgagagataatctatatcatgtagaagaattcttggataaaagcatccatctaaccaagacggataagaaatatatacttcaattgataagacacggtagatcatagaacagaccaaatatattattaataatttgtatatacatagatataattatcacatattaaaaattcacacatttttgataaatgggaactgctgcaacaattcagactcccaccaaattaatgaataaagaaaatgcagaaatgattttggaaaaaattgttgatcatatagttatgtatattagtgacgaatcaagtgattcagaaaataatcctgaatatattgattttcgtaacagatacgaagactatagatctctcattataaaaagtgatcacgagtttgtaaagctatgtaaaaatcatgcagagaaaagttctccagaaacgcaacaaatgattatcaaacacatatacgaacaatatcttattccagtatctgaagtactattaaaacctataatgtccatgggtgacataattacatataacggatgtaaagacaatgaatggatgctagaacaactctctaccctaaactttaacaatctccgcacatggaactcatgtagcataggcaatgtaacgcgtctgttttatacattttttagttatctgatgaaagataaactaaatatataagtataatcccattctaatactttaacctgatgtattacctgcatcttattagaatattaacctaactaaaagacataacataaaaactcattacatagttgataaaaagcggtaggatataaatattatggctgccaccgttccgcgttttgacgacgtgtacaaaaatgcacaaagaagaattctagatcaagaaacattttttagtagaggtctaagtagaccgttaatgaaaaacacatatctatttgataattacgcgtatggatggataccagaaactgcaatttggagtagtagatacgcaaacttagatgcaagtgactattatcccatttcgttgggattacttaaaaagttcgagtttctcatgtctctatataaaggtcctattccagtatacgaagaaaaagtaaatactgaattcatagccaatggatcgttctctggtagatacgtatcatatcttcgaaagttttctgctcttccaacaaacgagtttattagttttttgttactgacttccattccaatctataatatcttgttctggtttaaaaatactcagtttgatattactaaacacacattattcagatacgtctatacagataatgccaaacacctggcgttggctaggtatatgcatcaaacaggagactataagcctttgtttagtcgtctcaaagagaattatatatttaccggtcccgttccaataggtatcaaagatatagatcaccctaatcttagtagagcaagaagtccatccgattatgagacattagctaatattagtactatattgtactttaccaagtatgatccggtattaatgtttttattgttttacgtacctgggtattcaattactacaaaaattactccagccgtagaatatctaatggataaactgaatctaacaaagagcgacgtacaactgttgtaaattattttatgcttcgtaaaatgtaggttttgaaccaaacattctttcaaagaatgagatgcataaaactttattatccaatagattgactatttcggacgtcaatcgtttaaagtaaacttcgtaaaatattctttgatcactgccgagtttaaaacttctatcgataattgtctcatatgttttaatatttacaagttttttggtccatggtacattagccggacaaatatatgcaaaataatatcgttctccaagttctatagtttctggattatttttattatattcagtaaccaaatacatattagggttatctgcggatttataatttgagtgatgcattcgactcaacataaataattctagaggagacgatctactatcaaattcggatcgtaaatctgtttctaaagaacggagaatatctatacatacctgattagaattcatccgtccttcagacaacatctcagacagtctggttttgtacatcttaatcatattcttatgaaacttggaaacatctcttctagtttcactagtacctttattaattctctcaggtacagattttgaattcgacgatgccgagtatttcatcgttgtatatttcttcttcgattgcataatcagattcttatataccgcctcaaactctattttaaaattattaaacaatactctactattaatcagtcgttctaactctttcgctatttctatagacttatctacatcttgactgtctatctctgtaaacacggagtcggtatctccatacacgctacgaaaacgaaatctgtaatctataggcaacgatgttttcacaatcggattaatatctctatcgtccatataaaatggattacttaatggattggcaaaccgtaacataccgttagataactctgctccatttagtaccgattctagatacaagatcattctacgtcctatggatgtgcaactcttagccgaagcgtatgagtatagagcactatttctaaatcccatcagaccatatactgagttggctactatcttgtacgtatattgcatggaatcataaatggccttttcagttgaactggtagcctgttttaacatctttttatatctggctctctctgccaaaaatgttcttaatagtctaggaatggttccttctatcgatctatcgaaaattgctatttcagagatgaggttcggtagtctaggttcacaatgaaccgtaatatatctaggaggtggatatttctgaagcaatagctgattatttatttcttcttccaatctattggtactaacaacgacaccgactaatgtttccggagatagatttccaaagatacacacattaggatacagactgttataatcaaagattaatacattattactaaacattttttgttttggagcaaataccttaccgccttcataaggaaacttttgttttgtttctgatctaactaagatagttttagtttccaacaatagctttaacagtggacccttgatgactgtactcgctctatattcgaataccatggattgaggaagcacatatgttgacgcacccgcgtctgtttttgtttctactccataatactcccacaaatactgacacaaacaagcatcatgaatacagtatctagccatatctaaagctatgtttagattataatccttatacatctgagctaaatcaacgtcatcctttccgaaagataatttatatgtatcattaggtaaagtaggacataatagtacgactttaaatccattttcccaaatatctttacgaattactttacatataatatcctcatcaacagtcacataattacctgtggttaaaacctttgcaaatgcagcggctttgcctttcgcgtccgtagtatcgtcaccgatgaacgtcatttctctaactcctctatttaatactttacccatgcaactgaacgcgttcttggatatagaatccaatttgtacgaatccaatttttcagatttttgaatgaatgaatatagatcgaaaaatatagttccattattgttattaacgtgaaacgtagtattggccatgccgcctactcccttatgactagactgatttctctcataaatacagagatgtacagcttcctttttgtccggagatctaaagataatcttctctcctgttaataactctagacgattagtaatatatctcagatcaaagttatgtccgttaaaggtaacgacgtagtcgaacgttagttccaacaattgtttagctattcgtaacaaaactatttcagaacatagaactagttctcgttcgtaatccatttccattagtgactgtatcctcaaacatcctctatcgacggcttcttgtatttcctgttccgttaacatctcttcattaatgagcgtaaacaataatcgtttaccacttaaatcgatataacagtaacttgtatgcgagattgggttaataaatacagaaggaaacttcttatcgaagtgacactctatatctagaaataagtacgatcttgggatatcgaatctaggtatttttttagcgaaacagttacgtggatcgtcacaatgataacatccattgttaatctttgtcaaatattgctcgtccaacgagtaacatccgtctggagatatcccgttagaaatataaaaccaactaatattgagaaattcatccatggtggcattttgtatgctgcgtttctttggctcttctatcaaccacatatctgcgacggagcattttctatctttaatatctagattataacttattgtctcgtcaatgtctatagttctcatctttcccaacggcctcgcattaaatggaggaggagacaatgactgatatatttcgtccgtcactacgtaataaaagtaatgaggaaatcgtataaatacggtctcaccatttcgacatctggatttcagatataaaaatctgttttcaccgtgactttcaaaccaattaatgcaccgaacatccatttatagaatttagaaatatattttcatttaaatgaatcccaaacattggggaagagccgtatggaccattatttttatagtactttcgcaagcgggtttagacggcaacatagaagcgtgtaaacgaaaactatatactatagtcagcactcttccatgtcctgcatgtagacggcacgcgactatcgctatagaggacaataatgtcatgtctagcgatgatctgaattatatttattattttttcatcagattatttaacaatttggcatctgatcccaaatacgcgatcgatgtgacaaaggttaaccctttataaacttaacccattataaaacttatgattagtcacaactgaaataaccgcgtgattattttttggtataattctacacggcatggtttctgtaactatgaattcaacccccgttacattagtgaaatctttaacaaacagcaagggttcgtcaaagacataaaactcattgtttacaatcgaaatagaccccctatcacacttaaaataaaaaatatccttatcctttaccaccaaataaaattctgattggtcaatgtgaatgtattcacttaacagttccacaaatttatttattaactccgaggcacatacatcgtcggtattttttatggcaaactttactcttccagcatccgtttctaaaaaaatattaacgagttccatttatatcatccaatattattgaaatgacgttgatggacagatgatacaaataagaaggtacggtacctttgtccaccatctcctccaattcatgctctattttgtcattaactttaatgtatgaaaacagtacgccacatgcttccatgacagtgtgtaacactttggatacaaaatgtttgacattagtataattgttcaagactgtcaatctataatagatagtagctataatatattctatgatggtattgaagaagatgacaaccttggcatattgatcatttaacacagacatggtatcaacagatagcttgaatgaaagagaatcagtaattggaataagcgtcttctcgatagagtgtccgtataccaacatgtctgatattttgatgtattccattaaattatttagttttttctttttattttcgttaaacagcatttctgtcaacggaccccaacatcgttgaccgattaagttttgattgatttttccgtgtaatgcgtatctagtcagatcgtatagcctatccaataatccatcatctgtgcgtagatcacatcgtacactttttaattctctatagaagagcgacagacatctggagcaattacagacagcaatttctttattctctacagatgtaagatacttgaagacattcctatgatgatgcagaattttggataacacggtattgatggtatctgttaccataattcctttgatggctgatagtgtcagagcacaagatttccaatctttgacaatttttagcaccattatctttgttttgatatctatatcagacagcatggtgcgtctgacaacacagggattaagacggaaagatgaaatgattctctcaacatcttcaatggataccttgctattttttctggcattatctatatgtgcgagaatatcctctagagaatcagtatcctttttgatgatagtggatctcaatgacatgggacgtctaaaccttcttattttatcaccagattgcatggtgatttgtcttctttcttttatcataatgtaatctctaaattcatcggcaaattgtctatatctaaaatcataatatgagatgtttacctctacaaatatctgttcgtccaatgttagagtatctacatcagttttgtattccaaattaaacatggcaacggatttaattttatattcctctattaagtcctcgtcgataataacagaatgtagataatcatttaatccatcgtacatggttggaagatgcttgttgacaaaatctttaattgtcttgatgaaggtgggactatatctaacatcttgattaataaaatttataacattgtccataggatactttgtaactagttttatacacatctcttcatcggtaagtttagacagaatatcgtgaacaggtggtatattatattcatcagatatacgaagaacaatgtccaaatctatattgtttaatatattatatagatgtagcgtagctcctacaggaatatctttaactaagtcaatgatttcatcaaccgttagatctattttaaagttaatcatataggcattgatttttaaaaggtatgtagccttgactacattctcattaattaaccattccaagtcactgtgtgtaagaagattatattctatcataagcttgactacatttggtcccgataccattaaagaattcttatgatataaggaaacagcttttaggtactcatctactctacaagaattttggagagccttaacgatatcagtgacgtttattatttcaggaggaaaaaacctaacattgagaatgtcggagttaatagcttccagatacagtgattttggcaatagtccgtgtaatccataatccagtaacacgagctggtgcttgctagacaccttttcaatgtttaatttttttgaaataagctttgataaagccttcctcgcaaattccggatacatgaacatgtcggcgacatgattaagtattgttttttcattatttttatattttctcaacaagttctcaataccccaatagatgatagaatatcacccaatgcgtccatgttgtctatttccaacaggtcgctatatccaccaatagaagtttttccaaaaaagattctaggaacagttctaccaccagtaatttgttcaaaatagtcacgcaattcattttcgggtttaaattctttaatatcgacaatttcatacgctcctcttttgaaactaaacttatttagaatatccagtgcatttctacaaaaaggacatgtatacttgacaaaaattgtcactttgttattggccaacctttgttgtacaaattcctcggccattttaatatttaagtgatataaaactatctcgacttatttaactctttagtcgagatatatggacgcagatagctatatgatagccaactacagaaggcaaacgctataaaaaacataattacgacgagcatatttataaatatttttattcagcattacttgatatagtaatattaggcacagtcaaacattcaaccactctcgatacattaactctctcattttctttaacaaattctgcaatatcttcgtaaaaagattcttgaaactttttagaatatctatcgactctagatgaaatagcgttcgtcaacatactatgttttgtatacataaaggcgcccattttaacagtttctagtgacaaaatgctagcgatcctaggatcctttagaatcacatagattgacgattcgtctctcttagtaactctagtaaaataatcatacaatctagtacgcgaaataatattatccttgacttgaggagatctaaacaatctagttttgagaacatcgataagttcatcgggaatgacatacatactatctttaatagaactcttttcatccagttgaatggattcgtccttaaccaactgattaatgagatcttctattttatcattttccagatgatatgtatgtccattaaagttaaattgtgtagcgcttctttttagtctagcagccaatactttaacatcactaatatcgatatacaaaggagatgatttatctatggtattaagaattcgtttttcgacatctgtcaaaaccaattcctttttgcctgtatcatccagttttccatcctttgtaaagaaattattttctactagactattaataagactgataaggattcctccataattgcacaatccaaactttttaacaaaactagactttacaagatctacaggaatgcgtacttcaggtttcttagcttgtgattttttcttttgtggacattttcttgtgaccaactcatctaccatttcattgattttagcagtgaaataagctttcaatgcacgggcactgatactattgaaaacgagttgatcttcaaattccgccatttaagttcaccaaacaacttttaaatacaaatatatcaatagtagtagaataagaactataaaaaaaataataattaaccaataccaaccccaacaaccggtattattagttgatgtgactgttttctcatcacttagaacagatttaacaatttctataaagtctgtcaaatcatcttccggagaccccataaatacaccaaatatagcggcgtacaacttatccatttatacattgaatattggcttttctttatcgctatcttcatcatattcatcatcaatatcaacaagtcccagattacgagccagatcttcttctacattttcagtcattgatacacgttcactatctccagagagtccgataacgttagccaccacttctctatcaatgattagtttcttgagtgcgaatgtaatttttgtttccgttccggatctatagaaaactacaggtgtgataattgccttggccaattgtctttctcttttactgagtgattctagttcaccttctatagatctgagaatggatgattctccagtcgaaacatattctaccatggatccgtttaatttgttgatgaagatggattcatccttaaatgttttctctgtaatagtttccaccgaaagactatgcaaagaatttggaatgcgttccttgtgcttaatgtttccatagacggcttctagaagttgatacaacataggactagccgcggtaacttttatttttagaaagtatccatcgcttctatcttgtttagatttatttttataaagtttagtctctccttccaacataataaaagtggaagtcatttgactagataaactatcagtaagttttatagagatagacgaacaattagcgtattgagaagcatttagtgtaacgtattcgatacattttgcattagatttactaatcgattttgcatactctataacacccgcacaagtctgtagagaatcgctagatgcagtaggtcttggtgaagtttcaactctcttcttgattaccttactcatgattaaacctaaataattgtactttgtaatataatgatatatattttcactttatctcatttgagaataaaaatgtttttgtttaaccactgcatgatgtacagatttcggaatcgcaaaccaccagtggttttattttatccttgtccaatgtgaattgaatgggagcggatgcgggtttcgtacgtagatagtacattcccgtttttagaccgagactccatccgtaaaaatgcatactcgttagtttggaataactcggatctgctatatggatattcatagattgactttgatcgatgaaggctcccctgtctgcagccatttttatgatcgtcttttgtggaatttcccaaatagttttataaactcgcttaatatcttctggaaggtttgtattctgaatggatccaccatctgccataatcctattcttgatctcatcattccataattttctctcggttaaaactctaaggagatgcggattaactacttgaaattctccagacaatactctccgagtgtaaatattactggtatacggttccaccgactcattatttcccaaaatttgagcagttgatgcagtcggcataggtgccaccaataaactatttctaagaccgtatgttctgattttatcttttagaggttcccaattccaaagatccgacggtacaacattccaaagatcatattgtagaataccgttactggcgtacgatcctacatatgtatcgtatggtccttccttctcagctagttcacaactcgcctctaatgcaccgtaataaatggtttcgaagatcttcttatttagatcttgtgcttccaggctatcaaatggataatttaagagaataaacgcgtccgctaatccttgaacaccaataccgataggtctatgtctcttattagagatttcagcttctggaataggataataattaatatctataattttattgagatttctgacaattactttgaccacatccttcagtttgagaaaatcaaatcgcccatctattacaaacatgttcaaggcaacagatgccagattacaaacggctacctcattagcatccgcatattgtattatctcagtgcaaagattactacacttgatagttcctaaattttgttgattactctttttgttacacgcatccttataaagaatgaatggagtaccagtttcaatctgagattctataatcgctttccagacgactcgagcctttattatagatttgtatctcctttctctttcgtatagtgtatacaatcgttcgaactcgtctccccaaacattgtccaatccaggacattcatccggacacatcaacgaccactctccgtcatccttcactcgtttcataaagagatcaggaatccaaagagctataaatagatctctggttctatgttcctcgtttcctgtattctttttaagatcgaggaacgccataatatcagaatgccacggttccaagtatatggccataactccaggccgtttgtttcctccctgatctatgtatctagcggtgttattataaactctcaacattggaataataccgtttgatataccattggtaccggagatatagcttccactggcacgaatattactaattgatagacctattccccctgccattttagagattaatgcgcatcgttttaacgtgtcatagataccctctatgctatcatcgatcatgttaagtagaaaacagctagacatttggtgacgactagttcccgcattaaataaggtaggagaagcgtgcgtaaaccatttttcagaaagtagattgtacgtctcaatagctgagtctatatcccattgatgaattcctactgcgacacgcattaacatgtgctgaggtctttcaacgatcttgttgtttattttcaacaagtaggatttttccaaagttttaaaaccaaaatagttgtatgaaaagtctcgttcgtaaataataaccgagttgagtttatccttatatttgttaactatatccatggtgatacttgaaataatcggagaatgtttcccatttttaggattaacatagttgaataaatcctccatcacttcactaaatagtttttttgtttccttgtgtagatttgatacggctattctggcggctagaatggcataatccggatgttgtgtagtacaagtggctgctatttcggctgccagagtgtccaattctaccgttgttactccattatatattccttgaataaccttcatagctattttaataggatctatatgatccgtgtttaagccataacataattttctaatacgagacgtgattttatcaaacatgacattttccttgtatccatttcgtttaatgacaaacatttttgttggtgtaataaaaaaattatttaacttttcattaatagggatttgacgtatgtagcgtacaaaattatcgttcctggtatatagataaagagtcctatatatttgaaaatcgttacggctcgattaaactttaatgattgcatagtgaatatatcattaggatttaactccttgactatcagggcggcaccagaaattaccatcaaaagcattaatacagttatgccgatcgcagttagaacggttatagcatccaccatttatatctaaaaattagatcaaagaatatgtgacaaagtcctagttgtatactgagaattgacgaaacaatgtttcttacatatttttttcttattagtaactgacttaatagtaggaactggaaagctagacttgattattctataagtatagatacccttccaaataatattctctttgataaaagttccagaaaatgtagaattttttaaaaagttatcttttgctattaccaagattgtgtttagacgcttattattaatatgagtgatgaaatccacaccgcctctagatatcgcttttatttccacattagatggtaaatccaatagtgaaactatctttttaggaatgtatggactcgcgtttagaggagtgaacgtcttaggcgtcggaaaggatgattcatcaaacgaataaacaatttcacaaatggatgttaatgtattagtaggaaattttttgacgctagtggaattgaagattctaatggatgatgttctacctatttcatccgataacatgttaatttccgacaccaacggttttaatatttcgatgatatacggtagtctctctttcggacttatatagcttattccacaatacgagtcattatatactccaaaaaacaaaataactagtataaaatctgtatcgaatgggaaaaacgaaattatcgacataggtatagaatctggaacattgaacgtattaatacttaattctttttctgtggtaagtaccgataggttattgacattgtatggttttaaatattctataacttgagacttgatagatattagtgatgaattgaaaattatttttatcaccacgtgtgtttcaggatcatcgtcgacgcccgtcaaccaaccgaatggagtaaaataaatatcattaatatatgctctagatattagtatttttatcaatcctttgattatcatcttctcgtaggcgaatgattccatgatcaagagtgatttaagaacatcctccggagtattaatgggcttagtaaacagtccatcgttgcaataataaaagttatccaagttaaaggatattatgcattcgtttaaagatatcacctcatctgacggagacaattttttggtaggttttagagactttgaagctacttgtttaacaaagttattcatcgtcgtttactattctatttaattttgtagttaatttatcacatatcacattaattgactttttggtccatttttccatacgtttatattcttttaatcctgcgttatccgtttccgttatatccagggatagatcttgcaagttaaatagaatgctcttaaataatgtcatttttttatccgctaaaaatttaaagaatgtataaacttttttcaaagatttaaaacttttaggtggagttctagtacacaatatcataaacaaactaataaacatcccgcattcagattccaacagctgattaacttccacattaatacagcctattttcgctccaaatgtacattcgaaaaatctgaataaaacatcgatgtcacaatttgtattatccaatacagaatgtctgtgattcgtgttaaaaccatcggagaaggaatagaaataaaaattattatagtggtggaattcagttggaatattgcctccggagtcataaaaggatactaaacattgttttttatcataaattacacatttccaatgagacaaataacaaaatccaaacattacaaatctagaggtagaacttttaattttgtctttaagtatatacgataagatatgtttattcataaacgcgtcaaatttttcatgaatcgctaaggagtttaagaatctcatgtcaaattgtcctatataatccacttcggatccataagcaaactgagagactaagttcttaatacttcgattgctcatccaggctcctctctcaggctctattttcatcttgacgacctttggattttcaccagtatgtattcctttacgtgataaatcatcgattttcaaatccatttgtgagaagtctatcgccttagatactttttcccgtagtcgaggtttaaagaaatacgctaacggtatactagtaggtaactcaaagacatcatatatagaatggtaacgcgtctttaactcgtcggttaactctttcttttgatcgagttcgtcgctactattgggtctgctcaggtgccccgactctactagttccaacatcataccgataggaatacaagacactttgccagcggttgtagatttatcatatttctccactacatatccgttacaatttgttaaaaatttagatacatctatattgctacataatccagctagtgaatatatatgacataataaattggtaaatcctagttctggtattttactaattactaaatctgtatatctttccatttatcatggaaaagaatttaccagatatcttcttttttccaaactgcgttaatgtattctcttacaaatattcacaagatgaattcagtaatatgagtaaaacggaacgtgatagtttctcattggcggtgtttccagttataaaacatagatggcataacgcacacgttgtaaaacataaaggaatatacaaagttagtacagaagcacgtggaaaaaaagtatctcctccatcactaggaaaacccgcacacataaacctaaccgcgaagcaatatatatacagtgaacacacaataagctttgaatgttatagttttctaaaatgtataacaaatacagaaatcaattcgttcgatgagtatatattaagaggactattagaagctggtaatagtttacagatattttccaattccgtaggtaaacgaacagatactataggtgtactagggaataagtatccatttagcaaaattccattggcctcattaactcctaaagcacaacgagagatattttcagcgtggatttctcatagacctgtagttttaactggaggaactggagtgggtaagacgtcacaggtacccaagttattgctttggtttaattatttatttggtggattctctactctagataaaatcactgactttcacgaaagaccagtcattctatctcttcctaggatagctttagttagattgcatagcaataccattttaaaatcattgggatttaaggtactagatggatctcctatttctttacggtacggatctataccggaagaattaataaacaaacaaccaaaaaaatatggaattgtattttctacccataagttatctctaacaaaactatttagttatggcactcttattatagacgaagttcatgagcatgatcaaataggagatattattatagcagtagcgagaaagcatcatacgaaaatagattctatgtttttaatgactgccacgttagaggatgacagggaacggctaaaagtatttttacctaatcccgcatttatacatattcctggagatacactgtttaaaattagcgaggtatttattcataataagataaatccatcttccagaatggcatacatagaagaagaaaagagaaatttagttactgctatacagatgtatactcctcctgatggatcatccggtatagtctttgtggcatccgttgcacagtgtcacgaatataaatcatatttagaaaaaagattaccgtatgatatgtatattattcatggtaaggtcttagatatagacgaaatattagaaaaagtgtattcatcacctaatgtatcgataattatttctactccttatttggaatccagcgttactatacacaatgttacacacatttatgatatgggtagagtttttgtccccgctccttttggaggatcgcaacaatttatttctaaatctatgagagatcaacgaaaaggaagagtaggaagagttaatcctggtacatacgtctatttctatgatctgtcttatatgaagtctatacagcgaatagattcagaatttctacataattatatattgtacgctaataagtttaatctaacactccccgaagatttgtttataatccctacaaatttggatattctatggcgtacaaaggaatatatagactcgttcgatattagtacagaaacatggaataaattattatccaattattatatgaagatgatagagtatgctaaactttatgtactaagtcctattctcgctgaggagttggataactttgagaggacgggagaattaactagtattgtacgagaagccattttatctctaaatttacgaattaagattttaaattttaaacataaagatgatgatacgtatatacacttttgtaaaatattattcggtgtctataacggaacaaacgctactatatattatcatagacctctaacgggatatatgaatatgatttcagatactatatttgttcctgtagataataactaaaaatcaaactctaatgaccacatctttttttagagatgaaaaattttctacatctccttttgtagacacgactaaacattttgcagaaaaaagtttattagtgtttagataatcgtatacttcatcagtgtagatagtaaatgtgaacagataaaaggtattcttgctcaatagattggtaaattccatagaatatattaatcctttcttcttgagatcccacatcatttcaaccagagacgttttatccaatgatttacctcgtactataccacatacaaaactagattttgcagtgacgtcgtacctggtattcctaccaaacaaaattttacttttagttcttttagaaaattctaaggtagaatctctatttgccaatatgtcatctatggaattaccactagcaaaaaatgatagaaatatatattgatacatcgcagctggttttgatctactatactttaaaaacgaatcagattccataattgcctgtatatcatcagctgaaaaactatgttttacacgtattccttcggcatttctttttaatgatatatcttgtttagacaatgataaagttatcatgtccatgagagacgcgtctccgtatcgtataaatatttcattagatgttagacgcttcattaggggtatacttctataaggtttcttaatcagtccatcattggttgcgtcaagaactactatcggatgttgttgggtatctctagtgttacacatggccttactaaagtttgggtaaataactatgatatctctattaattatagatgcatatatttcattcgtcaaggatattagtatcgacttgctatcgtcattaatacgtgtaatgtaatcatataaatcatgcgatagccaaggaaaatttaaatagatgttcatcatataatcgtcgctataattcatattaatacgttgacattgactaatttgtaatatagcctcgccacgaagaaagctctcgtattcagtttcatcgataaaggataccgttaaatataactggttgccgatagtctcatagtctattaagtggtaagtttcgtacaaatacagaatccctaaaatattatctaatgttggattaatctttaccataactgtataaaatggagacggagtcataactattttaccgtttgtacttactggaatagatgaaggaataatctccggacatgctggtaaagacccaaatgtctgtttgaagaaatccaatgttccaggtcctaatctcttaacaaaaattacgatattcgatcccgatatcctttgcattctatttaccagcatatcacgaactatattaagattatctatcatgtctattctcccaccgttatataaatcgcctccgctaagaaacgttagtatatccatacaatggaatacttcatttctaaaatagtattcgttttctaattctttaatgtgaaatcgtatactagaaagggaaaaattatctttgagttttccgttagaaaagaaccacgaaactaatgttctgattgcgtccgattccgttgctgaattaatggatttacaccaaaaactcatataacttctagatgtagaagcattcgctaaaaaattagtagaatcaaaggatataagtagatgttccaacaagtgagcaattcccaagatttcatctatatcattctcgaatccgaaattagaaattcccaagtagatatcctttttcatccgatcgttgatgaaaatacgaactttattcggtaagacaatcatttactaaggagtaaaataggaagtaatgttcgtatgtcgttatcatcgtataaattaaaggtgtgttttttaccattaagtgacattataattttaccaatattggaattataatataggtgtatttgcgcactcgcgacggttgatgcatcggtaaatatagctgtatctaatgttctagtcggtatttcatcatttcgctgtctaataatagcgttttctctatctgtttccattacagctgcctgaagtttattggtcggataatatgtaaaataataagaaatacatacgaataacaaaaataaaataagatataataaagatgccatttagagatctaattttgttcaacttgtccaaattcctacttacagaagatgaggaatcgttggagatagtgtcttccttatgtagaggatttgaaatatcttatgatgacttgataacttactttccagataggaaataccataaatatatttataaagtatttgaacatgtagatttatcggaggaattaagtatggaattccatgatacaactttgcgagatttagtttatcttagattgtacaagtattccaagtgtatacggccgtgttataaattaggagataatctaaaaggcatagttgttataaaggacaggaatatttatattagggaagcaaatgatgacttgatagaatatctcctcaaggaatacactcctcagatttatacatattctaatgagcgcgtccccataactggttcaaaattaattctttgtggattttctcaagttacatttatggcgtatacaacgtcgcatataacaacaaataaaaaggtagatgttctcgtttccaaaaaatgtatagatgaactagtcgatccaataaattatcaaatacttcaaaatttatttgataaaggaagcggaacaataaacaaaatactcaggaagatattttattcggtaaccggtggccaaactccataggtagctttttctatttcggattttagaatttccaaattcaccagcgatttatcggttttggtgaaatccaaggatttattaatgtccacaaatgccatttgttttgtctgtggattgtatttgaaaatggaaacgatgtagttagatagatgcgctgcgaagtttcctattagggttccgcgcttcacgtcacccagcatacttgaatcaccatcctttaaaaaaaatgataagatatcaacatggagtatatcatactcggattttaattcttctactgcatcactgacattttcacaaatactacaatacggtttaccgaaaataatcagtacgttcttcatttatgggtatcaaaaacttaaaatcgttactgctggaaaataaatcactgacgatattagatgataatttatacaaagtatacaatggaatatttgtggatacaatgagtatttatatagccgtcgccaattgtgtcagaaacttagaagagttaactacggtattcataaaatacgtaaacggatgggtaaaaaagggagggcatgtaaccctttttatcgatagaggaagtataaaaattaaacaagacgttagagacaagagacgtaaatattctaaattaaccaaggacagaaaaatgctagaattagaaaagtgtacatccgaaatacaaaatgttaccggatttatggaagaagaaataaaggcaaaaatgcaattaaaaatcgataaacttacatttcaaatatatttatctgattctgataacataaaaatatcattgaatgagatactaacacatttcaacaataatgagaatgttacattattttattgtgatgaacgagacgcagaattcgttatgtgtctcgaggctaaaacacatttctctaccacaggagaatggccgttgataataagtaccgatcaggatactatgctatttgcatctactgataatcatcctaagatgataaaaaacttaactcaactgtttaaatttgttccctcggcagaggataactatttagcaaaattaacggcgttagtgaatggatgtgatttctttcctggactctatggggcatctataacacccaccaacttaaacaaaatacaattgtttagtgattttacaatcgataatatagtcactagtttggcaattaaaaattattatagaaagactaactctaccgtagacgtgcgtaatattgttacgtttataaacgattacgctaatttagacgatgtctactcgtatgttcctccttgtcaatgcactgttcaagaatttatattttccgcattagatgaaaaatggaatgaatttaaatcatcttatttagagaccgttccgttaccctgtcaattaatgtacgcgttagaaccacgtaaggagattgatgtttcagaagttaaaactttatcatcttatatagatttcgaaaatactaaatcagatatcgatgttataaaatctatatcctcgatttttggatattctaacgaaaactgtaacacgatagtattcggcatctataaggataatttactactgagtataaataattcattttactttaacgatagtctgttaataaccaatactaaaagtgataatataataaatataggttactagattaaaaatggtgttccaactcgtgtgctctacatgcggtaaagatatttctcacgaacgatataaattgattatacgaaaaaaatcattaaaggatgtactcgtcagtgtaaagaacgaatgttgtaggttaaaattatctacacaaatagaacctcaacgtaacttaacagtgcaacctctattggatataaactaatatggatccggttaattttatcaagacatatgcgcctagaggttctattatttttattaattataccatgtcattaacaagtcatttgaatccatcgatagaaaaacatgtgggtatttattatggtacgttattatcggaacacttggtagttgaatctacctatagaaaaggagttcgaatagtcccattggatagtttttttgaaggatatcttagtgcaaaagtatacatgttagagaatattcaagttatgaaaatagcagctgatacgtcattaactttattgggtattccgtatggatttggtcatgatagaatgtattgttttaaattggtagctgactgttataaaaatgccggtgttgaaacatcgtctaaacgaatattaggtaaagatatttttctgagccaaaacttcacagacgataatagatggataaagatatatgattctaataatttaacattttggcaaattgattaccttaaagggtgagttaatatgcataactactcctccgttgttttttccctcgttctttttcttaacgttgtttgccatcactctcataatgtaaagatattctaaaatggtaaacttttgcatatcggacgcagaaattggtataaatgttgtaattgtattatttcccgtcaatggactagtcacagctccatcagttttatatcctttagagtatttctcactcgtgtctaacattctagagcattccatgatctgtttatcgttgatattggccggaaagatagattttttattttttattatattactattggcaattgtagatataacttctggtaaatatttttctaccttttcaatctcttctattttcaagccggctatatattctgctatattgttgctagtatcaataccttttcttgctaagaagtcatatgtggtattcactatatcagttttaactggtagttccattagcctttccacttctgcagaataatcagaaattggttctttaccagaaaatccagctactataataggctcaccgatgatcattggcaaaatcctatattgtaccagattaatgagagcatatttcatttccaataattctgctagttcttgagacattgatttatttgatgaatctagttggttctctagatactctaccatttctgccgcatacaataacttgttagataaaatcagggttatcaaagtgtttagcgtggctagaatagtgggcttgcatgtattaaagaatgcggtagtatgagtaaaccgttttaacgaattatatagtctccagaaatctgtggcgttacatacatgagccgaatgacatcgaagattgtccaatatttttaatagctgctctttgtccattatttctatatttgactcgcaacaattgtagataccattaatcactgattcctttttcgatgccggacaatagcacaattgtttagctttggactctatgtattcagaattaatagatatatctcttaatacagattgcactatacattttgaaactatgtcaaaaattgtagaacgacgctgttctgcagccatttaactttaaataatttacaaaaatttaaaatgagcatccgtataaaaatcgataaactgcgccaaattgtggcatatttttcagagttcagtgaagaagtgtctataaatgtagactcgacggatgagttaatgtatatttttgccgccttgggcggatctgtaaacatttgggccattatacctctcagtgcatcagtgttctaccgcggagccgaaaatattgtgtttaatcttccggtgtccaaggtaaaatcgtgtttgtgtagttttcacaatgatgccatcatagatatagaacctgatctggaaaataatctagtaaaactttctagttatcatgtagtaagtgtcgattgtaacaaggaactgatgcctattaggacagatactactatttgtctaagtatagatcaaaagaaatcttacgtgtttaattttcacaagtatgaagaaaaatgttgtggtagaaccgtcattcatttagaatggttgttgggctttatcaagtgtattagtcagcatcagcatttggctattatgtttaaagatgacaatattattatgaagactcctggtaatactgatgcgttttccagggaatattctatgactgaatgttctcaagaactacaaaagttttctttcaaaatagctatctcgtctctcaacaaactacgaggattcaaaaagagagtcaatgtttttgaaactagaatcgtaatggataatgacgataacattctaggaatgttgttttcggatagagttcaatcctttaagatcaacatctttatggcgtttttagattaatactttcaatgagataaatatgggtggcggagtaagtgttgagctccctaaacgggatccgcctccgggagtacccactgatgagatgttattaaacgtggataaaatgcatgacgtgatagctcccgctaagcttttagaatatgtgcatataggaccactagcaaaagataaagaggataaagtaaagaaaagatatccagagtttagattagtcaacacaggacccggtggtctttcggcattgttaagacaatcgtataatggaaccgcacccaattgctgtcgcacttttaatcgtactcattattggaagaaggatggaaagatatcagataagtatgaagagggtgcagtattagaatcgtgttggccagacgttcacgacactggaaaatgcgatgttgatttattcgactggtgtcagggggatacgttcgatagaaacatatgccatcagtggatcggttcagcctttaataggagtgatagaactgtagagggtcaacaatcgttaataaatctgtataataagatgcaaacattatgtagtaaagatgctagtgtaccaatatgtgaatcatttttgcatcatttacgcgcacacaatacagaagatagcaaagagatgatcgattatattctaagacaacagtctgcggactttaaacagaaatatatgagatgtagttatcccactagagataagttagaagagtcattaaaatatgcggaacctcgagaatgttgggatccagagtgttcgaatgccaatgttaatttcttactaacacgtaattataataatttaggactttgcaatattgtacgatgtaatactagcgtgaacaacttacagatggataaaacttcctcattaagattgtcatgtggattaagcaatagtgatagattttctactgttcccgtcaatagagcaaaagtagttcaacataatattaaacattcgttcgacctaaaattgcatttgatcagtttattatctctcttggtaatatggatactaattgtagctatttaaatgggtgccgcggcaagcatacagacgacggtgaatacactcagcgaacgtatctcgtctaaattagaacaagaagcgaacgctagtgctcaaacaaaatgtgatatagaaatcggaaatttttatatccgacaaaaccatggatgtaacctcactgttaaaaatatgtgctctgcggacgcggatgctcagttggatgctgtgttatcagccgctacagaaacatatagtggattaacaccggaacaaaaagcatacgtgccagctatgtttactgctgcgttaaacattcagacaagtgtaaacactgttgttagagattttgaaaattatgtgaaacagacttgtaattctagcgcggtcgtcgataacaaattaaagatacaaaacgtaatcatagatgaatgttacggagccccaggatctccaacaaatttggaatttattaatacaggatctagcaaaggaaattgtgccattaaagcgttgatgcaattgacgactaaggccactactcaaatagcacctagacaagttgctggtacaggagttcagttttatatgattgttatcggtgttataatattggcagcgttgtttatgtactatgccaagcgtatgctgttcacatccaccaatgataaaatcaaacttattttagccaataaggaaaacgtccattggactacttacatggacacattctttagaacttctccgatggttattgctaccacggatatacaaaactgaaaatatattgataatattttaatagattaacatggaagttatcgctgatcgtctagacgatatagtgaaacaaaatatagcggatgaaaaatttgtagattttgttatacacggtctagagcatcaatgtcctgctatacttcgaccattaattaggttgtttattgatatactattatttgttatagtaatttatatttttacggtacgtctagtaagtagaaattatcaaatgttgttggtggcgctagtcatcacattaactattttttattactttatactataatagtactagactgacttctaacaaacatctcacctgccataaataaatgcttgatattaaagtcttctatttctaacactattccatctgtggaaaataatactctgacattatcgctaattgacacatcggtgagtgatatgcctataaagtaataatcttctttgggcacatataccagtgtaccaggttctaacaacctatttactggtgctcctgtagcatactttttctttaccttgagaatatccatcgtttgcttggtcaatagcgatatgtgattttttatcaaccactcgaaaaagtaattggagtgttcatatcctctacgggctattgtctcatggccgtgtatgaaatttaagtaacacgactgtggtagatttgttctatagagccggttgccgcaaatagatagaactaccaatatgtctgtacaaatgttaaacattaattgattaacagaaaaaacaatgttcgttctgggaatagaaaccagatcaaaacaaaattcgttagaatatatgccacgtttatacattgaatataaaataactacagtttgaaaaataacagtatcatttaaacatttaacttgcggggttaatctcacaactttactgtttttaaactgttcaaaatatagcatcgatccatgagaaatacgtttagccgcctttaatagaggaaatcccaccgcctttctggatctcaccaacgacgatagttctgaccagcaactcatttcttcatcatccacctgttttaacatataataggcaggagatagatatccgtcattgcaatattccttctcgtaggcacacaatctaatattgataaaatctccattctcttctctgcatttattatcttgtttcggtggctgattaggctgtagtcttggtttaggctttggtatatcgttgttgaatctattttggtcattaaatctttcatttcttcctggtatatttttatcacctcgtttggttggatttttgtctatattatcgtttgtaacatcggtacgggtattcatttatcacaaaaaaaacttctctaaatgagtctactgctagaaaacctcatcgaagaagataccatattttttgcaggaagtatatctgagtatgatgatttacaaatggttattgccggcgcaaaatccaaatttccaagatctatgctttctatttttaatatagtacctagaacgatgtcaaaatatgagttggagttgattcataacgaaaatatcacaggagcaatgtttaccacaatgtataatataagaaacaatttgggtctaggagatgataaactaactattgaagccattgaaaactatttcttggatcctaacaatgaagttatgcctcttattattaataatacggatatgactgccgtcattcctaaaaaaagtggtaggagaaagaataagaacatggttattttccgtcaaggatcatcacctatcttgtgtattttcgaaactcgtaaaaagattaatatttataaagaaaatatggaatccgcatcgactgagtatacacctatcggagacaacaaggctttgatatctaaatatgcgggaattaatatcctaaatgtgtattctccttccacatccataagattgaatgccatttacggattcaccaataaaaataaactagagaaacttagtactaataaggaactagaatcgtatagttctagccctcttcaagaacccattaggttaaatgattttctgggactattggaatgtgttaaaaagaatattcctctaacagatattccgacaaaggattgattactataaatggagaatgttcctaatgtatactttaatcctgtgtttatagagcccacgtttaaacattctttattaagtgtttataaacacagattaatagttttatttgaagtattcgttgtattcattctaatatatgtattttttagatctgaattaaatatgttcttcatgcctaaacgaaaaatacccgatcctattgatagattacgacgtgctaatctagcgtgtgaagacgataaattaatgatctatggattaccatggatgacaactcaaacatctgcgttatcaataaatagtaaaccgatagtgtataaagattgtgcaaagcttttgcgatcaataaatggatcacaaccagtatctcttaacgatgttcttcgcagatgatgattcattttttaagtatttggctagtcaagatgatgaatcttcattatctgatatattgcaaatcactcaatatctagactttctgttattattattgatccaatcaaaaaataaattagaagccgtgggtcattgttatgaatctctttcagaggaatacagacaattgacaaaattcacagactttcaagattttaaaaaactgtttaacaaggtccctattgttacagatggaagggtcaaacttaataaaggatatttgttcgactttgtgattagtttgatgcgattcaaaaaagaatcctctctagctaccaccgcaatagatcctattagatacatagatcctcgtcgcgatatcgcattttctaacgtgatggatatattaaagtcgaataaagtgaacaataattaattctttattgtcatcatgaacggcggacatattcagttgataatcggccccatgttttcaggtaaaagtacagaattaattagacgagttggtaccatttttattaggcgtcacgttaccaataaaaaacaaaaaaataaattaactaattagcgatgatataatataatcatgttcatcatgagggaatctatctatcgcgtgatgattgtaatcctgtacttgagtcttatttcaagttttttggtaatatgcagcatggaacacggatatttccaggagggcattagtagatttaagatttgcccgtatcactggtacaaacaacacatgagcttgctcttcagaaggtactaccataaactggatagcattatatgagcttgactaatttttatcaataatacaaaaaaatgaaataaaaccgtctattatacgctggttaccgctattagctctaaccattttcaggatgcggtccctcgttatcgttcttctctttcctagtatcatctatagcatggtcataaggcggtgtgaaaagatggaagaagagacgtggaagcttaaaataggtatgtgtatccaggctaaggacttctacagtaagagaacagattgttcagtgcataggcccgacgtaggcggcgggttgattaccgagggaaacggttacagggtagtcgtacacgatcaatgcgaagagcctaatccgttcatcatagccacaaccaagcaaactcacttcggcgttacgcattcctatatcgaattctcaaacagcaacacgggtgctccagaaaacattccagactgttccaagcacatccttatctctgtttattgtgaccaagaagcgtcaggtctggactttcacaccctgaagtatgtggaatcaaattatctccatataactgtaaagtatgacacaagctgcataaaccatttgggagtcaactatagttttatgaacgaatgcgagaggaagctcacctccatttatgaaaccgacacccttacttgcggtgcgaaagacattcaaaccagggataagtatctcaagacgtgtaccaacaccaaattcgaccgatcagtctataaaacccacatgcagaagtccaagatccttcacgtcaagaccgaactctaaccactatcactaatcatcaagcaatttttataacttcagcgatattgccgacattaaatcatctgaattaatttcttgtattcttcagtagtatacgtatttatttattgtcggatatataaatcatacaacaatgcacctccagtattatgcgatttcattggtctcactggtaagtcttatcgactgtcataaactggcgtttaattttaatctcgaaatcaacggatccgacacccactcaaccgtcgacgtatatcttgatgattcacagattattacgtttgatggcaaagacattagaccgactattccgtttatgattggcgatgagatatttttgcctttctacaagaatgtgttcagcgaattcttctctttgtttaggcgcgtccctacgagtaccccgtatgaggatctgacgtacttttatgagtgcgattacacagataataaaagcacattcgaccaattttacctctacaatggagaggaatacaccgtaaagactcaggaagcgactaacaagaacatgtggttgactacttccgaattccggctgaaaaaatggtttgatggtgaggactgcataatgcacctgcggagtttggtaaggaaaatggaagacagcaaacgcaatacagggtagttataaatattttcataatcagagctcggaggtaatgatatgtatcaatcggtgtgtagaaagtgttacatcgactcataatattatattttttatctaaaaaactaaaaataaacattgattaaattttaatataatacttaaaaatggatgttgtgtcgttagataaaccgtttatgtattttgaggaaattgataatgagttagattacgaaccagaaagtgcaaatgaggtcgcaaaaaaactaccgtatcaaggacagttaaaactattactaggagaattattttttcttagtaagttacagcgacacggtatattagatggtgccaccgtagtgtatataggatcggctcctggtacacatatacgttatttgagagatcatttctataatttaggagtgatcatcaaatggatgctaattgacggccgccatcatgatcctattttaaatggattgcgtgatgtgactctagtgactcggttcgttgatgaggaatatctacgatccatcaaaaaacaactgcatccttctaagattattttaatttctgatgtaagatccaaacgaggaggaaatgaacctagtacggcggatttactaagtaattacgctctacaaaatgtcatgattagtattttaaaccccgtggcatctagtcttaaatggagatgcccgtttccagatcaatggatcaaggacttttatatcccacacggtaataaaatgttacaaccttttgctccttcatattcagctgaaatgagattattaagtatttataccggtgagaacatgagactgactcgagttaccaaattagacgctgtaaattatgaaaaaaagatgtactaccttaataagatcgtccgtaacaaagtagttgttaactttgattatcctaatcaggaatatgactattttcacatgtactttatgctgaggaccgtgtactgcaataaaacatttcctactactaaagcaaaggtactatttctacaacaatctatatttcgtttcttaaatattccaacaacatcaactgaaaaagttagtcatgaaccaatacaacgtaaaatatctagcaaaaattctatgtctaaaaacagaaatagcaagagatccgtacgcggtaataaatagaaacgtgctactgagatatactaccgatatagagtataatgatttagttactttaataaccgttagacataaaattgattctatgaaaactgtgtttcaggtatttaacgaatcatccataaattatactccggttgatgatgattatggagaaccaatcattataacatcgtatcttcaaaaaggtcataacaagtttcctgtaaattttctatacatagatgtggtaatatctgacttatttcctagctttgttagactagatactacagaaactaatatagttaatagtgtactacaaacaggcgatggtaaaaagactcttcgtcttcccaaaatgttagagacggaaatagttgtcaagattctctatcgccctaatataccattaaaaattgttagatttttccgcaataacatggtaactggagtagagatagccgatagatctgttatttcagtcgctgattaatcaattagtagagatgagataagaacattataataatcaataatattatcttatatctcgtttagaaaaatgctaatattaaaatagctaacgctagtaatccaatcggaagccatttgatatctataatagggtatctaatttcctgattcagatagcggacagctatattctcggtagctactcgtttggaatcacaaacattatttacatctaatttactatctgtaatggaaacgtttcccaatgaaatggtacaatccgatacattgcattttgttatatttttttttaaagaggctggtaacaacgcatcgcttcgtttacatggctcgtaccaacaataatagggtaatcttgtatctattcctatccgtactatgcttttatcaggataaatacatttacatcgtatatcgtctttgttagcatcacagaatgcataaatttgttcgtccgtcatgataaaaatttaaagtgtaaatataactattatttttatagttgtaataaaaagggaaatttgattgtatactttcggttctttaaaagaaactgacttgataaaaatggctgtaatctctaaggttacgtatagtctatatgatcaaaaagagattaatgctacagatattatcattagtcatgttaaaaatgacgacgatatcggtaccgttaaagatggtagactaggtgctatggatggggcattatgtaaaacttgtgggaaaacggaattggaatgtttcggtcactggggtaaagtaagtatttataaaactcatatagttaagcctgaatttatttcagaaattattcgtttactgaatcatatatgtattcactgcggattattgcgttcacgagaaccgtattccgacgatattaacctaaaagagttatcgggacacgctcttaggagattaaaggataaaatattatccaagaaaaagtcatgttggaacagcgaatgtatgcaaccgtatcaaaaaattactttttcaaagaaaaaggtttgtttcgtcaacaagttggatgatattaacgttcctaattctctcatctatcaaaagttaatttctattcatgaaaagttttggccattattagaaattcatcaatatccagctaacttattttatacagactactttcccatccctccgctgattattagaccggctattagtttttggatagatagtatacccaaagagaccaatgaattaacttacttattaggtatgatcgttaagaattgtaacttgaatgctgatgaacaggttatccagaaggcggtaatagaatacgatgatattaaaattatttctaataacactaccagtatcaatttatcatatattacatccggcaaaaataatatgattagaagttatatcgtcgcccgacgaaaagatcagaccgctagatctgtaattggtcccagtacatctatcaccgttaatgaggtaggaatgcccgcatatattagaaatacacttacagaaaagatatttgttaatgcctttacagtggataaagttaaacaactattagcgtcaaaccaagttaaattttactttaataaacgattaaaccaattaacaagaatacgccaaggaaagtttatcaaaaataaaatacatttattgcctggtgattgggtagaagtagctgttcaagaatatacaagtattatttttggaagacagccgtctctacatagatacaacgtcatcgcttcatctatcagagctaccgaaggagatactatcaaaatatctcccggaattgccaactctcaaaatgctgatttcgacggagatgaagaatggatgatattggagcaaaatcctaaagccgtaattgaacaaagtattcttatgtatccgacgacgttactcaaacacgatattcatggagcccccgtttatggatctattcaagatgaaatcgtagcagcgtattcattgtttaggatacaagatctttgtttagatgaagtattgaacatcttggggaaatatggaagagagttcgatcctaaaggtaaatgtaaattcagcggtaaagatatctatacttacttgataggtgaaaagattaattatccgggtctcttaaaggatggtgaaattattgcaaacgacgtagatagtaattttgttgtggctatgaggcatctgtcattggctggactcttatccgatcataagtcgaacgtggaaggtatcaactttattatcaagtcatcttatgtttttaagagatatctatctatttacggttttggggtgacattcaaagatctgagaccaaattcgacgttcactaataaattggaggccatcaacgtagaaaaaatagaacttatcaaagaagcatacgccaaatatctcaacgatgtaagagacgggaaaatagttccattatctaaagctttagaggcggactatgtggaatccatgttatccaacttgacaaatcttaatatccgagagatagaagaacatatgagacaaacgctgatagatgatccagataataacctcctgaaaatggccaaagcgggttataaagtaaatcctacagaactaatgtatattctaggtacgtatggacaacaaaggattgatggtgaaccagcagagactcgagtattgggtagagtcttaccttactatcttccagactctaaggatccagaaggaagaggttacattcttaattctttaacaaaaggattaacgggttctcaatattacttttcgatgctggttgccagatctcaatctactgatatcgtctgtgaaacatcacgtaccggaacactggctagaaaaatcattaaaaagatggaggatatggtggtcgacggatacggacaagtagttataggtaatacgctcatcaagtacgccgccaattataccaaaattctaggctcagtatgtaaacctgtagatcttatctatccagatgagtccatgacttggtatttggaaattagtgctctgtggaataaaataaaacagggattcgtttactctcagaaacagaaacttgcaaagaagacattggcgccgtttaatttcctagtattcgtcaaacccaccactgaggataatgctattaaggttaaggatctgtacgatatgattcataacgtcattgatgatgtgagagagaaatacttctttacggtatctaatatagattttatggagtatatattcttgacgcatcttaatccttctagaattagaattacaaaagaaacggctatcactatctttgaaaagttctatgaaaaactcaattatactctaggtggtggaactcctattggaattatttctgcacaggtattgtctgagaagtttacacaacaagccctgtccagttttcacactactgaaaaaagtggtgccgtcaaacaaaaacttggtttcaacgagtttaataacttgactaatttgagtaagaataagaccgaaattatcactctggtatccgatgatatctctaaacttcaatctgttaagattaatttcgaatttgtatgtttgggagaattaaatccagacatcactcttcgaaaagaaacagataaatatgtagtagatataatagttaatagattatacatcaagagagcagaaataaccgaattagttgtcgaatatatgattgaacgatttatctcctttagcgtcattgtaaaggaatggggtatggagacattcattgaggacgaggataatattagatttactgtctacctaaatttcgttgaaccggaagaattgaatcttagtaagtttatgatggttcttccgggtgccgccaacaagggcaagattagtaaattcaagattcctatctctgattatacgggttatgacgacttcaatcaaacaaaaaagctcaataagatgactgtagaactcatgaatctaaaagaattgggttctttcgatttggaaaacgtcaacgtgtatcctggagtatggaatacatacgatatcttcggtatcgaggccgctcgtgaatacttgtgcgaagccatgttaaacacctatggagaagggttcgattatctgtatcagccttgtgatcttctcgctagtttactatgtgctagttacgaaccagaatcagttaataaattcaagttcggtgcagctagtactcttaagagagctacgttcggagacaataaagcattgttaaacgcggctcttcataaaaagtcagaacctattaacgataatagtagctgccacttttttagcaaggtccctaatataggaactggatattacaaatactttatcgacttgggtcttctcatgagaatggaaaggaaactatctgataagatatcttctcaaaagatcaaggaaatggaagaaacagaagacttttaattcttatcaataacatatttttctatgatctgtcttttaaacgatggattttccacaaatgcgcctctcaagtccctcatagaatgatacacgtataaaaaatatagcataggcaatgactccttatttttagacattagatatgccaaaatcatagccccgcttctatttactcccgcagcacaatgaaccaacacgggctcgtttcgttgatcacatttagataaaaaggcggttacgtcgtcaaaatatttactaatatcggtagttgtatcatctaccaacggtatatgaataatattaatattagagttaggtaatgtatatttatccatcgtcaaatttaaaacatatttgaacttaacttcagatgatggtgcatccatagcatttttataatttcccaaatacacattattggttacccttgtcattatagtgggagatttggctttgtgcatatctccagttgaacgtagtagtaagtatttatacaaacttttcttatccatttataacgtacaaatggataaaactactttatcggtaaacgcgtgtaatttagaatacgttagagaaaaggctatagtaggcgtacaagcagccaaaacatcaacacttatattctttgttattatattggcaattagtgcgctattactctggtttcagacgtctgataatccagtctttaatgaattaacgagatatatgcgaattaaaaatacggttaacgattggaaatcattaacggatagcaaaacaaaattagaaagtgatagaggtagacttctagccgctggtaaggatgatatattcgacttcaaatgtgtggatttcggcgcctattttatagctatgcgattggataagaaaacatatctgccgcaagctattaggcgaggtactggagacgcgtggatggttaaaaaggcggcaaaggtcgatccatctgctcaacaattttgtcagtatttgataaaacacaagtctaataatgttattacttgtggtaatgagatgttaaatgaattaggttatagcggttattttatgtcaccgcattggtgttccgattttagtaatatggaatagtgttagataaatgcggtaacgaatgttcctgtaaggaaccataacagtttagatttaacgttaaagatgagcataaacataataaacaaaattacaatcaaacctataacattaatatcaaacaatccaaaaaatgaaatcagtggagtagtaaacgcgtacataactcctggataacgtttagcagctgccgttcctattctagaccaaaaattcggtttcatgttttcgaagcggtgttctgcaacaagtcggggatcgtgttctacatatttggcggcgttatccagtatctgcctattgatcttcatttcgttttcgattctggctatttcaaaataaaatcccgatgatagacctccagactttataatttcatctacgatgttcagcgccgtagtaactctaataatataggctgataagctaacatcataccctcctgtatatgtgaatatggcatgatttttgtccattacaagctcggttttaactttattgcctgtaataatttctctcatctgtaggatatctatttttttgtcatgcattgccttcaagacgggacgaagaaacgtaatatcctcaataacgttatcgttttctacaataactacatattctacctttttattttctaactcggtaaaaaaattagaatcccatagggctaaatgtctagcgatatttcttttcgtttcctctgtacacatagtgttacaaaaccctgaaaagaagtgagtatacttgtcatcatttctaatgtttcctccagtccactgtataaacgcataatccttgtaatgatctggatcatccttgactaccacaacatttcttttttctggcataacttcgttgtcctttacatcatcgaacttctgatcattaatatgctcatgaacattaggaaatgtttctgatggaggtctatcaataactggcacaacaataacaggagttttcaccgccgccatttagttattgaaattaatcatatacaactctttaatacgagttatattttcgtctatccattgtttcacatttacatatttcgacaaaaagatataaaatgcgtattccaatgcttctctgtttaatgaattactaaaatatacaaacacgtcactgtctggcaataaatgatatcttagaatattgtaacaatttattttgtattgcacatgttcgtgatctatgagttcttcttcgaatggcataggatctccgaatctgaaaacgtataaataggagttagaataataatatttgagagtattggtaatatataaactctttagcggtataattagtttttttctctcaatttctatttttagatgtgatggaaaaatgactaattttgtagcattagtatcatgaactctaatcaaaatcttaatatcttcgtcacacgttagctctttgaagtttttaagagatgcatcagttggttctacagatggagtaggtgcaacaattttttgttctacacatgtatgtactggagccattgttttaactataatggtgcttgtatcgaaaaactttaatgcagatagcggaagctcttcgccgcgactttctacatcgtaattgggttctaacgccgatctctgaatggatactagttttctaagttctaatgtgattctctgaaaatgtaaatccaattcctccggcattatagatgtgtatacatcggtaaataaaactatagtatccaacgatcccttctcgcaaattctagtcttaaccaaaaaatcgtatataaccacggagatggcgtatttaagagtggattcttctaccgttttgttcttggatgtcatataggaaactataaagtccgcactactgttaagaatgattactaacgcaactatatagttcaaattaagcattttggaaacataaaataactctgtagacgatacttgactttcgaataagtttgcagacaaacgaagaaagaacagacctctcttaatttcagaagaaaactttttttcgtattcctgacgtctagagtttatatcaataagaaagttaagaattagtcggttaatgttgtatttcattacccaagtttgagatttcataatattatcaaaagacatgataatattaaagataaagcgctgactatgaacgaaatagctatatggttcgctcaagaatatagtcttgttaaacgtggaaacgataactgtatttttaatcacgtcagcggcatctaaattaaatataggtatatttattccacacactctacaatatgccacaccatcttcataataaataaattcgttagcaaaattattaattttagtgaaatagttagcgtcaactttcatagcttccttcaatctaatttgatgctcacacggtgcgaattccactctaacatcccttttccatgcctcaggttcatcgatctctataatatctagtttcttgcgtttcacaaacacgggctcgtctctcgcgatgagatctgtatagtaactatgtaaatgataactagatagaaagatgtagctatatagatgacgatcctttaagagaggtataataactttaccccaatcagataaactattgttatggtcttcggaaaaagaatttttataaatttttccagtattttccaaatatacgtacttgacatctaaaaaatccttaatgataataggaatggataatccgtctattttataaagaaatacatatcgcacattatacttttttttggaaatgggaataccgatgtgtctacataaatatgcaaagtctaaatattttttagagaatcttagttggtccaaattcttttccaagtacggtaatagatttttcatattgaacggtatcttcttaatctctggttctagttccgcattaaatgatgaaactaagtcactatttttataactaacgattacatcacctctaacatcatcatttaccagaatactgatcttcttttgtcgtaaatacatgtctaatgtgttaaaaaaaagatcatacaagttatacgtcatttcatctgtggtattcttgtcattgaaggataaactcgtactaatctcttctttaacagcctgttcaaatttatatcctatatacgaaaaaatagcaaccagtgtttgatcatccgcgtcaatattctgttctatcgtagtgtataacaatcgtatatcttcttctgtgatagtcgatacgttataaaggttgataacgaaaatatttttatttcgtgaaataaagtcatcgtaggattttggacttatattcgcgtctagtagatatgcttttatttttggaatgatctcaattagaatagtctctttagagtccatttaaagttacaaacaactaggaaattggtttatgatgtataatttttttagtttttatagattctttattctatacttaaaaaatgaaaataaatacaaaggttcttgagggttgtgttaaattgaaagcgagaaataatcataaattatttcattatcgcgatatccgttaagtttgtatcgtaatggcgtggtcaattacaaataaagcggatactagtagcttcacaaagatggctgaaatcagagctcatctaaaaaatagcgctgaaaataaagataaaaacgaggatattttcccggaagatgtaataattccatctactaagcccaaaaccaaacgagccactactcctcgtaaaccagcggctactaaaagatcaaccaaaaaggaggaagtggaagaagaagtagttatagaggaatatcatcaaacaactgaaaaaaattctccatctcctggagtcagcgacattgtagaaagcgtggccgctgtagagctcgatgatagcgacggggatgatgaacctatggtacaagttgaagctggtaaagtaaatcatagtgctagaagcgatctttctgacctaaaggtggctaccgacaatatcgttaaagatcttaagaaaattattactagaatctctgcagtatcgacggttctagaggatgttcaagcagctggtatctctagacaatttacttctatgactaaagctattacaacactatctgatctagtcaccgagggaaaatctaaagttgttcgtaaaaaagttaaaacttgtaagaagtaaatgcgtgcacttttttataaagatggtaaactctttaccgataataattttttaaatcctgtatcagacgataatccagcgtatgaggttttgcaacatgttaaaattcctactcatttaacagatgtagtagtatatgaacaaacgtgggaggaggcgttaactagattaatttttgtgggaagcgattcaaaaggacgtagacaatacttttacggaaaaatgcatgtacagaatcgcaacgctaaaagagatcgtatttttgttagagtatataacgttatgaaacgaattaattgttttataaacaaaaatataaagaaatcgtccacagattccaattatcagttggcggtttttatgttaatggaaactatgttttttattagatttggtaaaatgaaatatcttaaggagaatgaaacagtagggttattaacactaaaaaataaacacatagaaataagtcccgatgaaatagttatcaagtttgtaggaaaggacaaagtttcacatgaatttgttgttcataagtctaatagactatataagccgctattgaaactgacggatgattctagtcccgaagaatttctgttcaacaaactaagtgaacgaaaggtatacgaatgtatcaaacagtttggtattagaatcaaggatctccgaacgtatggagtcaattatacgtttttatataatttttggacaaatgtaaagtccatatctcctcttccatcaccaaaaaagttaatagcgttaactatcaaacaaactgctgaagtggtaggtcatactccatcaatttcaaaaagagcttacatggcaacgactattttagaaatggtaaaggataaaaattttttagatgtagtatctaaaactacgttcgatgaattcctatctatagtcgtagatcacgttaaatcatctacggatggatgatatagatctttacacaaataattacaagaccgataaatggaaatggataagcgtatgaaatctctcgcaatgacagctttcttcggagagctaaacacattagatattatggcattgataatgtctatatttaaacgccatccaaacaataccattttttcagtggataaggatggtcagtttatgattgatttcgaatacgataattataaggcttctcaatatttggatctgaccctcactccgatatctggagatgaatgcaagactcacgcatcgagtatagccgaacaattggcgtgtgtggatattattaaagaggatattagcgaatatatcaaaactactccccgtcttaaacgatttataaaaaaataccgcaatagatcagatactcgtatcagtcgagatacagaaaagcttaaaatagctctagctaaaggcatagattacgaatatataaaagacgcttgttaataagtaaatgaaaaaaaactagtcgtttataataaaacacaatatggatgccaacatagtatcatcttctactattgcaacgtatatagacgctttagcaaagaatgcttcagaattagaacagaggtctaccgcatacgaaataaataatgaattggaactagtatttattaagccgccattaattactttgacaaatgtagtgaatatctctacgattcaggaatcgtttattcgatttaccgttactaataaggaaggtgtcaaaattagaactaagattccattatctaaggtacatggtctagatgtaaaaaatgtacagttagtagatgctatagataacatagtttgggaaaagaaatcattagtgacggaaaatcgtcttcacaaagaatgcttgttgagactatcgacagaggaacgtcatatatttttggattacaagaaatatggatcctctatccgactagaattagtcaatcttattcaagcaaaaacaaaaaactttacgatagactttaagctaaaatattttctaggatccggtgcccaatctaaaagttctttgttgcacgctattaatcatccaaagtcaaggcctaatacatctctggaaatagaattcacacctagagacaatgaaaaagttccatatgatgaactaataaaggaattgacgactctatcacgtcatatatttatggcttctccagagaatgtaattctttctccgcctattaacgcacctataaagacttttatgttgcctaaacaagatatagtaggtctggatctggaaaatctatatgccgtaactaagactgacggcattcctataactatcagagttacatcaaacgggttgtattgttattttacacatcttgggtatattattagatatccagttaagagaataatagattccgaagtagtagtctttggtgaggcagttaaggataagaactggaccgtatatctcattaagctaatagagcctgtgaatgcaatcaatgatagactagaagaaagtaagtatgttgaatctaaactagtggatatttgtgatcggatagtattcaagtcaaagaaatatgaaggtccgtttactacaactagtgaagtcgtcgatatgttatctacatatttaccaaagcaaccagaaggtgttattctgttctattcaaagggacctaaatctaacattgattttaaaattaaaaaggaaaatactatagaccaaactgcaaatgtagtatttaggtacatgtccagtgaaccaattatctttggagaatcgtctatctttgtagagtataagaaatttagcaacgataaaggctttcctaaagaatatggttctggtaagattgtgttatataacggcgttaattatctaaataatatctattgtttggaatatattaatacacataatgaagtgggtattaagtccgtggttgtacctattaagtttatagcagaattcttagttaatggagaaatacttaaacctagaatcgataaaaccatgaaatatattaactcagaagattattatggaaatcaacataatatcatagtcgaacatttaagagatcaaagcatcaaaataggagatatctttaacgaggataaactatcggatgtgggacatcaatacgccaataatgataaatttagattaaatccagaagttagttattttacgaataaacgaactagaggaccgttgggaattttatcaaactacgtcaagactcttcttatttctatgtattgttccaaaacatttttagacgattccaacaaacgaaaggtattggcgattgattttggaaacggtgctgacctggaaaaatacttttatggagagattgcgttattggtagcgacggatccggatgctgatgctatagctagaggaaatgaaagatacaacaaattaaactctggaattaaaaccaagtactacaaatttgactacattcaggaaactattcgatccgatacatttgtctctagtgtcagagaagtattctattttggaaagtttaatatcatcgactggcagtttgctatccattattcttttcatccgagacattatgctaccgtcatgaataacttatccgaactaactgcttctggaggcaaggtattaatcactaccatggacggagacaaattatcaaaattaacagataaaaagacttttataattcataagaatttacctagtagcgaaaactatatgtctgtagaaaaaatagctgatgatagaatagtggtatataatccatcaacaatgtctactccaatgactgaatacattatcaaaaagaacgatatagtcagagtgtttaacgaatacggatttgttcttgtagataacgttgatttcgctacaattatagaacgaagtaaaaagtttattaatggcgcatctacaatggaagatagaccgtctacaaaaaactttttcgaactaaatagaggagccattaaatgtgaaggtttagatgtcgaagacttacttagttactatgttgtttatgtcttttctaagcggtaaataataatatggtatgggttctgatatccccgttctaaatgcattaaataattccaatagagcgatttttgttcctataggaccttccaactgtggatactctgtattgttaatagatatattaatacttttgtcgggtaacagaggttctacgtcttctaaaaataaaagtttgataacatctggcctgttcataaataaaaacttggcgattctatatatactcttattatcaaatctagccattgtcttatagatgtgagctactgtaggtgtaccatttgattttctttctaatactatatatttctctcgaagaagttcttgcacatcatctgggaataaaatactactgttgagtaaatcagttattttttttatatcgatattgatggacatttttatagttaaggataataagtatcccaaagtcgataacgacgataacgaagtatttatacttttaggaaatcacaatgactttatcagatcaaaattaacaaaattaaaggagcatgtatttttttctgaatatattgtgactccagatacatatggatctttatgcgtcgaattaaatgggtctagttttcagcacggtggtagatatatagaggtggaggaatttatagatgctggaagacaagttagatggtgttctacatccaatcatatatctgaagatatacccgaagatatacacactgataaatttgtcatttatgatatatacacttttgacgctttcaagaataaacgattggtattcgtacaggtacctccgtcgttaggagatgatagctatttgactaatccgttattgtctccgtattatcgtaattcagtagccagacaaatggtcaatgatatgatttttaatcaagattcatttttaaaatatttattagaacatctgattagaagccactatagagtttctaaacatataacaatagttagatacaaggataccgaagaattaaatctaacgagaatatgttataatagagataagtttaaggcgtttgtattcgcttggtttaacggcgtttcggaaaatgaaaaggtactagatacgtataaaaaggtatctaatttgatataatgaattcagtgactgtatcacacgcgccatatactattacttatcacgatgattgggaaccagtaatgagtcaattggtagagttttataacgaagtagccagttggctgctacgagacgagacgtcgcctattcctgataagttctttatacagttgaaacaaccgcttagaaataaacgagtatgtgtgtgcggtatagatccgtatccgaaagatggaactggtgtaccgttcgaatcaccaaattttacaaaaaaatcaattaaggagatagcttcatctatatctagattaaccggagtaattgattataaaggttataaccttaatataatagacggggttataccctggaattattacttaagttgtaaattaggagaaacaaaaagtcacgcgatctactgggataagatttccaagttactgctgcagcatataactaaacacgttagtgttctttattgtttgggtaaaacagatttctcgaatatacgggcaaagttagaatccccggtaactaccatagtgggatatcatccagcggctagagaccgtcaattcgagaaagatcgatcatttgaaattatcaacgttttactggaattagacaacaaggtacctataaattgggctcaagggtttatttattaatgctttagtgaaattttaacttgtgttctaaatggatgcggctattagaggtaatgatgttatctttgttcttaagactataggtgtcccgtcagcgtgcagacaaaatgaagatccaagatttgtagaagcatttaaatgcgacgagttagaaagatatattgagaataatccagaatgtacactattcgaaagtcttagggatgaggaagcatactctatagtcagaattttcatggatgtagatttagacgcgtgtctagacgaaatagattatttaacggctattcaagattttattatcgaggtgtcaaactgtgtagctagattcgcgtttacagaatgcggcgccattcatgaaaatgtaataaaatccatgagatctaatttttcattgactaagtctacaaatagagataaaacaagttttcatattatctttttagacacgtataccactatggatacattgatagctatgaaacgaacactattagaattaagtagatcatctgaaaatccactaacaagatcgatagacactgccgtatataggagaaaaacaactcttcgggttgtaggtactaggaaaaatccaaattgcgacactattcatgtaatgcaaccacctcatgataatatagaagattacctattcacttacgtggatatgaacaacaatagttattacttttctctacaacgacgattggaggatttagttcctgataagttatgggaaccagggtttatttcattcgaagacgctataaaaagagtttcaaaaatattcattaattctataataaactttaatgatctcgatgaaaataattttacaacggtaccactggtcatagattacgtaacaccttgtgcattatgtaaaaaacgatcgcataaacatccgcatcaactatcgttggaaaatggtgctattagaatttacaaaactggtaatccacatagttgtaaagttaaaattgttccgttggatggtaataaactgtttaatattgcacaaagaattttagacactaactctgttttattaaccgaacgaggagaccatatagtttggattaataattcatggaaatttaacagcgaagaacccttgataacaaaactaattttgtcaataagacatcaactacctaaggaatattcaagcgaattactctgtccaagaaaacgaaagactgtagaagctaacatacgagacatgttagtagattcagtggagaccgatacctatccggataaacttccgtttaaaaatggtgtattggacctggtagacggaatgttttactctggagatgatgctaaaaaatatatgtgtactgtatcaaccggatttaaatttgacgatacaaagttcgtcgaagacagtccagaaatggaagagttaatgaatatcattaacgatatccaaccattaacggatgaaaataagaaaaatagagagctatatgaaaaaacattatctagttgtttatgcggtgctaccaaaggatgtttaacattcttttttggagaaactgcaactggaaagtcgacaaccaaacgtttgttaaagtctgctatcggtgacctgtttgttgagacgggtcaaacaattttaacagatgtattggataaaggacctaatccatttatcgctaacatgcatttgaaaagatctgtattctgtagcgaactacctgattttgcatgtagtgggtcaaagaaaatcagatctgataatattaaaaagttgacagaaccttgtgtcattggaagaccgtgtttctccaataaaattaataatagaaaccatgcgacaatcattatcgatactaattacaaacctgtttttgataggatagataacgcattaatgagaagaattgccgtcgtgcgattcagaacacacttttctcaaccttctggtagagaggctgctgaaaataatgacgcgtacgataaagtcaaactattagacgaggggttagatggtaaaatacaaaataatagatatagattcgcatttctatacttgttggtgaaatggtacagaaaatatcatgttcctattatgaaactatatcctacacccgaagagattcctgactttgcattctatctcaaaataggtactctgttggtatctagctctgtaaagcatattccattaatgacggacctctccaaaaagggatatatattgtacgataatgtggtcactcttccgttgactactttccaacagaaaatatccaagtattttaattctagactatttggacacgatatagagagcttcatcaatagacataagaaatttgccaatgttagtgatgaatatctgcaatatatattcatagaggatatttcatctccgtaaatatatgctcatatatttatagaagatatcacatatctaaatgaataccggaattatagatttatttgataatcatgttgatagtataccaactatattacctcatcagttagctactctagattatctagttagaactatcatagatgagaacagaagcgtgttattgttccatattatgggatcaggtaaaacaataatcgctttgttgttcgccttggtagcttccagatttaaaaaggtttacattctagtgccgaacatcaacatcttaaaaattttcaattataatatgggtgtagctatgaacttgtttaatgacgaattcatagctgagaatatctttattcattccacaacaagtttttattctcttaattataacgataacgtcattaattataacggattatctcgctacaataactctatttttatcgttgatgaggcacataatatctttgggaataatactggagaacttatgaccgtgataaaaaataaaaacaagattccttttctactattgtctggatctcccattactaacacacctaatactctgggtcatattatagatttaatgtccgaagagacgatagattttggtgaaattattagtcgtggtaagaaagtaattcagacacttcttaacgaacgcggtgtgaatgtacttaaggatttgcttaaaggaagaatatcatattacgaaatgcctgataaagatctaccaacgataagatatcacggacgtaagtttctagatactagagtagtatattgtcacatgtctaaacttcaagagagagattatatgattactagacgacagctatgttatcatgaaatgtttgataaaaatatgtataacgtgtcaatggcagtattgggacaacttaatctgatgaataatttagatactttatttcaggaacaggataaggaattgtacccaaatctgaaaataaataatggcgtgttatacggagaagaattggtaacgttaaacattagttccaaatttaaatactttattaatcggatacagacactcaacggaaaacattttatatacttttctaattctacatatggcggattggtaattaaatatatcatgctcagtaatggatattctgaatataatggttctcagggaactaatccacatatgataaacggcaaaccaaaaacatttgctatcgttactagtaaaatgaaatcgtctttagaggatctattagatgtgtataattctcctgaaaacgatgatggtagtcaattgatgtttttgttttcatcaaacattatgtccgaatcctatactctaaaagaggtaaggcatatttggtttatgactatcccagatactttttctcaatacaaccaaattcttggacgatctattagaaaattctcttacgccgatatttctgaaccagttaatgtatatcttttagccgccgtatattccgatttcaatgacgaagtgacgtcattaaacgattacacacaggatgaattaattaatgttttaccatttgacatcaaaaagctgttatatctaaaatttaagacgaaagaaacgaatagaatatactctattcttcaagagatgtctgaaacgtattctcttccaccacatccatcaattgtaaaagttttattgggagaattggtcagacaatttttttataataattctcgtattaagtataacgataccaagttacttaaaatggttacatcagttataaaaaataaagaagacgctaggaattacatagatgatattgtaaacggtcacttctttgtatcgaataaagtatttgataaatctcttttatacaaatacgaaaacgatattattacagtaccgtttagactttcctacgaaccatttgtttggggagttaactttcgtaaagaatataacgtggtatcttctccataaaactgatgagatatataaagaaataaatgtcgagctttgttaccaatggataccttccagttacattggagccacacgagctgacgttagacataaaaactaatattaggaatgccgtatataagacgtatctccatagagaaattagtggtaaaatggccaagaaaatagaaattcgtgaagacgtggaattacctctcggcgaaatagttaataattctgtagttataaacgttccgtgtgtaataacctacgcgtattatcacgttggggatatagttagaggaacattaaacatcgaagatgaatcaaatgtaactattcaatgtggagatttaatctgtaaactaagtagagattcgggtactgtatcatttagcgattcaaagtactgcttttttcgaaatggtaatgcgtatgacaatggcagcgaagtcactgccgttctaatggaggctcaacaaggtatcgaatctagttttgtttttctcgcgaatatcgtcgactcataagaaagagaatagcggtaagtataaacacgaatactatggcaataattgcgaatgttttattcccttcgatatatttttgataatatgaaaaacatgtctctctcaaatcggacaaccatctcataaaatagttatctcgcgctggcgaggtggttgccgctcgtataatctccccagaataatatacttgcgtgtcgtcgttcaatttatacggatttctatagttctctgttatataatgcggttttccatcatgattagacgacgacaatagtgttctaaatttagatagttgatcagaatgaatgtttattggcgttggaaaaattatccatgctgcgtctgcagagtggttgatagttgttcctagatatgtaaaataatccaacgtactaggtagcaaattgtctagataaaatactgaatcaaacggcgcagacgtattagcggatctaatggaatccaattgattgactatcttttgaaaatatacatttttatgatccgatacttgtaagaatatagaaataatgataagtccatcatcgtgtttttttgcctcttcataagaactatattttttcttattccaatgaacaagattaatctctccagagtatttgtacacatctatcaagtgattggatccataatcgtcttcctttccccaatatatatgtagtgatgataacacatattcattggggagaaaccctccacttatatatcctcctttaaaattaatccttactagttttccagtgttctggatagtggttggtttcgactcattataatgtatgtctaacggcttcaatcgcgcgttagaaattgcttttttagtttctatattaataggagatagttgttgcggcatagtaaaaatgaaatgataactgtttaaaaatagctcttagtatgggaattacaatggatgaggaagtgatatttgaaactcctagagaattaatatctattaaacgaataaaagatattccaagatcaaaagacacgcatgtgtttgctgcgtgtataacaagtgacggatatccgttaataggagctagaagaacttcattcgcgttccaggcgatattatctcaacaaaattcagattctatctttagagtatccactaaactattacggtttatgtactacaatgaactaagagaaatctttagacggttgagaaaaggttctatcaacaatatcgatcctcactttgaagagttaatattattgggtggtaaactagataaaaaggaatctattaaagattgtttaagaagagaattaaaagaggaaagtgatgaacgtataacagtaaaagaatttggaaatgtaattctaaaacttacaacacgggataaattatttaataaagtatatataggttattgcatggcgtgttttattaatcaatcgttggaggatttatcgcatactagtatttacaatgtagaaattagaaagattaaatcattaaatgattgtattaacgacgataaatacgaatatctgtcttatatttataatatgctagttaatagtaaatgaacttttacagatctagtataattagtcagattattaagtataatagacgactagctaagtctattatttgcaaggatgactctcaaattattacactcacggcattcgttaaccaatgcctatggtgtcataaacgagtatccgtgtccgctattttattaactactgataacaaaatattagtatgtaacagacgagatagttttctctattctgaaataattagaactagaaacatgtttagaaagaaacgattatttctgaattattccaattatttgtccaaacaggaaagaagtatactatcgtcatttttttctctatatccagctactgctgataatgatagaatagacgctatttatccgggtggcatacccaaaaggggtgagaatgttccagagtgtctatccagggaaatcaaagaagaagttaatatagacaattcttttgtattcatagacactcggttttttattcatggtatcatagaagataccattatcaacaaattttttgaggtaattttctttgtcggaagaatatctctaacgagtgatcaaattattgatacctttaaaagtaatcatgaaatcaaggatctaatatttttagatccgaattcaggtaatggactccaatacgaaattgcaaaatatgctctagatactgcaaaacttaaatgttacggccatagaggatgttattatgaatcattaaaaaaattaactgaggatgattgattagaaaatataaattaatttaccatcgtgtatttttataacgggattgtccggcatatcatgtagatagttaccgtctacatcgtatactcgaccatctacgcctttaaatcctctatttattgacattaatctattagaattggaataccaaatattagtaccctcaattagtttattggtaatattttttttagacgatagatcgatggctcttgaaaccaaggttttccaaccggactcattgtcgatcggtgagaagtctttttcattagcatgaatccattctaatgatgtatgtttaaacactctaaacaattggacaaattcttttgatttgctttgaatgatttcaaataggtcttcgtctacagtaggcataccattagataatctagccattataaagtgcacgtttacatatctacgttctggaggagtaagaacgtgactattgagacgaatggctcttcctactatctgacgaagagacgcctcgttccatgtcatatctaaaatgaagatatcattaattgagaaaaaactaataccctcgcctccactagaagagaatacgcatgttttaatgcattctccgttagtgtttgattcttggttaaactcagccaccgccttgattctagtatcttttgttctagatgagaactctatattagagataccaaagactttgaaatatagtaataagatttctattcctgactgattaacaaatggttcaaagactagacatttaccatgggatgctaatattcccaaacatacatctataaatttgacgcttttctcttttaattcagtaaatagagagatatcagccgcactagcatcccctttcaatagttctccctttttaaaggtatttaatgcggatttagaaaactctctatctcttaatgaatttttaaaatcattatatagtgttgctatctcttgcgcgtattcgccgggatcacgattttgtctttcaggaaagctatcgaacgtaaacgtagtagccatacgtctcagaattctaaatgatgatataccagtttttatttctgcgagtttagccttttgataaatctcttcttgcttttttgacatattaacgtatcgcattaatactgttttcttagcgaatgatgcagacccttctacgttatcaaaaatagaaaactcgttattaactatgtacgaacataggcctcctagtttggagactaattctttttcatcgactagacgtttattctcaaatagtgattggtgttgtaaggatcctggtcgtagtaagttaaccaacatggtgaattcttgcacactattgacgataggtgtagccgataaacaaatcatcttatggttttttaatgcgatggtcttggataaaaaattatatactgaacgagtaggacggatcttaccatcttctttgattaatgatttagaaatgaagttatgacattcatcaataatgacgcatattctactcttggaattaatagttttgatattagtaaaaaatttatttctaaaattttgatcatcgtaattaataaaaatacaatccttcgttatctctggagcgtatctgagtatagtgttcatccaaggatcttctatcaaagcctttttcaccaataagataatagcccaattcgtataaatatccttaagatgtttgagaatatatacagtagtcattgttttaccgacacccgtttcatggaacaataaaagagaatgcatactgtctaatcctaagaaaactcttgctacaaaatgttgataatccttgaggcgtactacgtccgaccccatcatttcaacgggcatattagtagttctgcgtaaggcataatcgatataggccgcgtgtgatttactcatttatgagtgataagtaataactatgttttaaaaatcacagcagtagtttaactagtcttctctgatgtttgttttcgatactttttgaatcagaagtcatactagaataaagcaacgagtgaacgtaatagagagcttcgtatactctattcgaaaactctaagaacttattaatgaattccgtatccactggattgtttaaaatactaaattgaacactgttcacatccttccaagaagaagacttagtgacggacttaacatgagacataaataaatccaaattttttttacaaacatcactagccaccataatggcgctatctttcaaccagctatcgcttacgcattttagcagtctaacatttttaaagagactacaatatattctcatagtatcgattacacctctaccgaataaagttggaagtttaataatacaatatttttcgtttacaaaatcaaataatggtcgaaacacgtcgaaggttaacatcttataatcgctaatgtatagattgttttcagtgagatgattattagatttaatagcatctcgttcacgtttgaacagtttattgcgtgcgctgaggtcggcaactacggcgtccgctttagtactcctcccataatactttacgctattaatctttaaaatttcatagactttatctagatcgctttctggtaacatgatatcatgtgtaaaaagttttaacatgtcggtcggcattctatttagatcattaactctagaaatctgaagaaagtaattagctccgtattccagactaggtaatgggcttttacctagagacagattaagttctggcaatgtttcataaaatggaagaaggacatgcgttccctcccggatattttttacaatttcatccatttacaactctatagtttgttttcattattattagttattatctcccataatcttggtaatacttaccccttgatcgtaagataccttatacaggtcattacatacaactaccaattgtttttgtacataatagattggatggttgacatccatggtggaataaactactcgaacagatagtttatctttccccctagatacattggccgtaatagttgtcggcctaaagaatatctttggtgtaaagttaaaagttagggttcttgttccattattgctttttgtcagtagttcattataaattctcgagatgggtccgttctctgaatatagaacatcatttccaaatctaacttctagtctagaaataatatcggtcttattcttaaaatctattcccttgatgaagggatcgttaatgaacaaatccttggcctttgattcggctgatctattatctccgttatagacgttacgttgactagtccaaagacttacaggaatagatgtatcgatgatgttgatactatgtgatatgtgagcaaagattgttctcttagtggcatcactatatgttccagtaatggcggaaaactttttagaaatgttatatataaaagaattttttcgtgttccaaacattagcagattagtatgaagataaacactcatattatcaggaacattatcaatttttacatacacatcagcatcttgaatagaaacgataccatcttctggaacctcaacaatctcggcagactccggataaccagtcggtggaccatcgctaacaataactagatcatccaacaatctactcacatatgcatctatataatctttttcatcttgtgagtaccctggatacgaaataaatttattatccgtatttccataataaggtttagtataaacagagagcgatgttgccgcatgaacttcagttacagtcgccgttggttggtttatttgacctattactctcctaggtttctctataaacgatggtttaatttgtacattcttaaccatatatccaataaagctcaattcaggaacataaacaaattctttgttgaacgtttcaaagtcgaacgaagagtcacgaataacgatatcggatactggattgaaggttaccgttacggtaatttttgaatcggatagtttaagactgctgaatgtatcttccacatcaaacggagttttaatataaacgtatactgtagatggttctttaatagtgtcattaggagttaggccaatagaaatatcattaagttcactagaatatccagagtgtttcaaagcaattgtattattgatacaattattatataattcttcgccctcaatttcccaaataacaccgttacacgaagagatagatacgtgattaatacatttatatccaacatatggtacgtaaccgaatcttcccatacctttaacttctggaagttccaaactcagaaccaaatgattaagcgcagtaatatactgatccctaatttcgaagctagcgatagcctgattgtctggaccatcgtttgtcataactccggatagagaaatatattgcggcatatataaagttggaatttgactatcgactgcgaagacattagaccgtttaatagagtcatccccaccgatcaaagaattaatgatagtattattcattttctatttaaaatggaaaaagcttacaataaactccgtagagaaatatctataatttgtgagttttccttaaagtaacagcttccgtaaacgccgtctttatctcttagtaagtttattgtatttataaccttttccttatcttcatagaatactaaaggcaacaaagaaatttttggttcttctctaagagctacgtgagacttaaccatagaagccaacgaatccctacatattttagaacagaaataccctacttcaccacccttgtatgtctcaatactaataggtctaaaaaccaaatcttgattacaaaaccaacacttatcaattacactatttgtcttaatagacacatctgccatagatttataatactttggtagtatacaagcgagtgcttcttctttagcgggcttaaagactgctttaggtgctgaaataaccacatctggaaggcttactcgcttagccatttaattacggaactatttttttatacttctaatgagcaagtagaaaacctctcatctacaaaaacatactcgtgtccataatcctctaccatagttacacgttttttagatctcatatgtgctaaaaagttttcccatactaattggttactattatttttcgtataatttttaacagtttgaggttttagatttttagttacagaagtgatatcgaatattttatccaaaaagaatgaataattaattgtcttagaaggagtgttttcttggcaaaagaataccaagtgcttaaatatttctactacttcattaatcttttctgtactcagattcagtttctcatcttttacttgattgattatttcaaagactaacttataatcctttttatttattctctcgttagccttaagaaaactagatacaaaatttgcatctacatcatccgtggatatttgatttttttccatgatatccaagagttccgagataatttctccagaacattgatgagacaataatctccgcaatacatttctcaaatgaataagtttattagacacgtggaagtttgactttttttgtacctttgtacatttttgaaataccgactcgcaaaaaatacaatattcatatccttgttcagatactataccgttgtgtctacaaccgctacataatcgtagattcatgttaacactctacgtatctcgtcgtccaatattttatataaaaacattttatttctagacgttgccagaaaatcctgtaatacttttagttttttgggctgtgaataaagtatcgccctaatatggttaccgtcctccgccaatatagtagttaaattatccgcacatgcaaaagaacaccgcttaggcggattcagtacaatgttatatttttcgtaccaactcatttaaatatcataatctaaaatagttctgtaatatgtctagcgctaatatattgatcataatcctgtgcataaattaagatacaacaatgtctcgaaatcatcgacatggcttcttccatagttagaagatcgtcgtcaaagttagcaacgtgattcatcaacatttgctgttttgaggcagcaaatactgaaccgtcgccattcaaccattcataaaaaccatcgtctgaatccattgataatttcttgtactggtttttgagagctcgcatcaatctagcatttctagctcccggattgaaaacagaaagaggatcgtacatccagggtccattttctgtaaatagaatcgtataatgtcccttcaagaagatatcagacgatccacaatcaaagaattggtctccgagtttgtaacaaactgcggactttaacctatacatgataccgtttagcataatttctggtgatacgtcaatcggagtatcatctattagagatctaaagccggtgtaacattctccaccaaacatattcttattctgacgtcgttctacataaaacatcattgctccattaacgataacaggggaatgaacagcactacccatcacattagttcccaatggatcaatgtgtgtaactccagaacatcttccatagcctatgttaggaggagcgaacaccactcttccactattgccatcgaatgccatagaataaatatccttggaattgatagaaatcggactgtcggatgttgtgatcatcttcataggattaacaacgatgtatggtgccgcctgaagtttcatatcgtaactgatgccgttcataggtctagccacagaaaccaacgtaggtctaaatccaactatagacaaaatagaagccaatatctgttcctcatctgtcataacttgagagcatccagtatgaataatcttcattagatggggatctaccgcatcatcatcgttacaataaaaaattcccattctaatgttcataattgcttttctaatcatggtatgcatgtttgctctctgaatctctgtggaaattagatctgatacacctgtaatcactatcggattatcctccgtaagacgattaaccaacaacatataattataagactttacttttctaaattcataaagttgctggattaggctataggtgtctccatgtacatacgcgttctcgagcgcaggaagtttaataccgaatagtgccatcagaataggatgaatatagtaattagtttctggttttctataaataaaagacaaatcttgtgaactagacatatcggtaaaatgcatggattggaatcgtgtagtcgacagaagaatatgatgattagatggagagtatattttatctaactctttgagttggtcaccgattctaggactagctcgagaatgaataagtactaaaggatgagtacatttcacagaaacactagcattgttcaatgtgctctttacatgggtaaggagttgaaatagctcgtttctatttgttctgacaatatttagtttattcataatgttaagcatatcctgaatagtaaagttagatgtgtcatacttgttagtagttagatatttagcaattgcattcccatcatttctcaatctcgtactccaatcatgcgtggatgctacttcgtcgatggaaaccatacaatcctttttgataggctgttgagattgattatttcctgcacgtttaggtttggtacgttgatttctagcccctgcggatataaagtcatcgtctacaatttgggacaatgaattgcatacactacaagacaaagatttatcagaagtgtgaatatgatcttcatctaccaaagaaagagtttgattagtataactagattttagtcctgcgttagatgttaaaaaaacatcgctattgaccacggcttccattatttatattcgtagtttttactcgaaagcgtgattttaatatccaatcttattacttttggaatcgttcaaaacctttgactagttgtagaatttgatctattgccctacgcgtatactcccttgcatcatatacgttcgtcaccagatcgtttgtttcggcctgaagttggtgcatatctttttcaacactcgacatgagatccttaagggccatatcgtctagattttgttgagatgctgctcctggatttggattttgttgtgctgttgtacatactgtaccaccagtaggtgtaggagtacatacagtggccacaataggaggttgaggaggtgtaaccgttggagtagtacaagaaatatttccatccgattgttgtgtacatgtagttgttggtaacgtctgagaaggttgggtagatggcggtgtcgtcgtcttttgatctttattaaatttagagataatatcctgaacagcattgctcggcgtcaacgctggaaggagtgaactcgccggcgcatcagtatctgcagacagccaatcaaaaagattagacatatcagatgatgtattagtttgttgtcgtggttttggtgtaggagcagtactactaggtagaagaataggagccgatgtaggtgtcggaaccggctgtggagttatatgaatagttggttgtagcggttggataggctgtctgctggcggccatcatattatctctagctagttgttctcgcaactgtctttgataatacgactcttgagactttagtcctatttcaatcgcttcatcctttttcgtatccggatccttttcttcagaataatagattgacgactttggtgtagaggattctgccagcccctgtgagaacttgttaaagaagtccatttaaggctttaaaattgaattgcgattataagattaaatggcagacacagacgatattatcgactatgaatccgatgatctcactgaatacgaggatgatgaagaagaggaagaagatggagagtcactagaaactagtgatatagatcccaaatcttcttataagattgtagaatcagcatccactcatatagaagatgcgcattccaatcttaaacatatagggaatcatatatctgctcttaaacgacgctatactagacgtataagtctatttgaaatagcgggtataatagcagaaagctataacttgcttcaacgaggaagattacctctagtttcagaattttctgacgaaacgatgaagcaaaatatgctacatgtaattatacaagagatagaggagggttcttgtcctatagtcatcgaaaagaacggagaattgttgtcggtaaacgattttgacaaagatggtctaaaattccatctagactatattatcaaaatttggaaacttcaaaaacgatattagaatttatacgaatatcgttctctaaatgtcacaatcaagtctcgcatgttcagcaatttattgtcgtactttatatcgtgttcattaacgatatcttgcaaaatagtaatgattctatcttccttcgatagatattcttcagagattattgtcttatattctttcttgttatcagatatgaatttgataagactttgaacattattgatacccgtctgtttaattttttctacagatattttagttttggcagattctatcgtatctgtcaatagacatccaacatcgacattcgacgtcaattgtctataaatcaacgtataaattttagaaataacattagcgaattgttgtgcattgatgtcgttattctgaaacagtatgattttaggtagcattttcttaacaaagagaacgtatttattgttactcagttgaacagatgatatatccagattactaacgcatctgattccgtataccaaactttcagaagaaatggtatacaattgtttgtattcattcaatgtctctttttcagaaattagtttagagtcgaatactgcaataattttcaagagatagttttcatcagataagattttatttagtgtagatatgataaaactattgttttgttggagaacttgatacgccgcgttctctgtagtcgacgctctcaaatgggaaacgatctccattatttttttggaatcggatactatatcttcggtatcttgacgcagtctagtatacatagagttaagagagattagagtttgtacattaagcaacatgtctctaaatgtggctacaaacttttccttttccacatcatctagtttattatataccgatttcacaacggcaccagatttaaggaaccagaatgaaaaactctgataactacaatatttcatcatagttacgattttatcatcttctatagttggtgtaatagcgcatacctttttctccaagactggaaccaacgtcataaaaatgtttaaatcaaaatccatatcaacatctgatgcgctaagaccagtctcgcgttcaagattatctttactaatggtgacgaactcatcgtatagaactctaagtttgtccattatttatttacagatttagttgtttaatttatttgtgctcttccagagttgggatagtatttttctaacgtcggtattatattattaggatctacgttcatatgtatcataatattaatcatccacgttttgataaatctatctttagcttctgaaataacgtatttaaacaaaggagaaaaatatttagctacggcatcagacgcaataacattttttgtaaatgtaacgtatttagacgacagatcttcgttaaaaagttttccatctatgtagaatccatcagttgttaacaccattcccgcgtcagattgaataggagtttgaatagtttgttttggaaatagatccttcaataacttatagttgggtgggaaaaaatcgattttatcactagactctttcttttttactatcattacctcatgaactatttcttgaatgagtatatgtattttctttcctatatcggacgcgttcattggaaaatataccatgtcgttaactataagaatatttttatcctcgtttacaaactgaataatatcagatgtagttcgtaaacgaactatatcatcaccagcacaacatctaactatatgatatccactagtttcctttagtcgtttattatcttgttccatattagcagtcattccatcatttaagaaggcgtcaaagataatagggagaaatgacattttggattctgttacaactttaccaaaattaaggatatacggacttactatctttttctcaacgtcaatttgatgaacacacgatgaaaatgtacttcgatgagattgatcatgtagaaaacaacaagggatacaatatttccgcatatcatgaaatatattaagaaatcccaccttattatatttccccaaaggatccatgcacgtaaacattatgccgttatcattaataaagacttctttctcatcggatctgtaaaagttgttactgatttttttcattccaggatctagataattaataatgatgggttttctattcttattctttgtattttggcatatcctagaccagtaaacagtttccactttggtaaaatcagcagacttttgaacgctattaaacatggcattaatggcaataactaaaaatgtaaaatatttttctatgttaggaatatggtttttcactttaatagatatatggtttttggccaaaatgatagatatttttttatccgaggatagtaaaatattattagtcgccgtctctataaaaatgaagctagtctcgatatccaattttattctagaattgataggagtcgccaaatgtaccttatacgttatatctcccttgatgcgttccatttgtgtatctatatcggacacaagatctgtaaatagttttacgttattaatcatcacggtatcgccgtcgctagataatgctaatgtaccatccaagtcccaaatggagagatttaactgttcatcgtttagaataaaatgattaccggtcatattaataaagtgttcatcgtatctagataacaacgacttataattaatgtccaagtcttgaactcgctgaatgatcttttttaacccagttagttttagattggtacgaaatatattgttaaactttgattctacagtaatgtccaaatctagttgtggaaatacttccatcaacattgtttcaaacttgataatattattatctacatcttcatacgatccaaattccggaatagatgtatcacatgctcttgccacccagataaccaaaaagtcacacgctccaggatatacattgtataaaaagctatcgtttttaagtagggtttttttctgcgtgtatacgaagggattaaaaatagtattatcaacgtaactatattccaaattattcttatgagaatagataataatatcgtccttaatatctaacaaatttcctaaatatccctttaattgagtcattcgaagcgtcaatagaatatgtctcttaactatttccggctgttgtatatttaaatgacttcgtaaaaaataatatatgggcgacttctcatctatgtaatcatatggagtgagatatagggctcgttctacctcctgccccttacccacctgtaataccaattgcggacttactatatatcgcatatttatatcgtggggtaaagtgaaaatctactaccgatgatgtaagtcttacaatgttcgaaccagtaccagatcttaatttggaggcctccgtagaactaggggaggtaaatatagatcaaacaacacctatgataaaggaaaatagcggttttatatcccgtagtagacgtctattcgcccatagatctaaggatgatgagagaaaactagcactacgattctttttacaaagactttattttttagatcatagagagattcattatttgttcagatgcgttgacgctgtaaaagacgtcactattaccaaaaaaaataacattatcgtggcgccttatatagcacttttaactatcgcatcaaaaggatgcaaacttacagaaacaatgattgaagcattctttccagaactatataatgaacatagtaagaaatttaaattcaactctcaagtatccatcatccaagaaaaactcggataccagtttggaaactatcacgtttatgattttgaaccgtattactctacagtagctctggctattcgagatgaacattcatctggcatttttaatatccgtcaagagagttatctggtaagttcattatctgaaataacatatagattttatctaattaatctaaaatctgatcttgttcaatggagtgctagtacgggcgctgtaattaatcaaatggtaaatactgtattgattacagtgtatgaaaagttacaactggtcatagaaaatgattcacaatttacatgttcattggctgtggaatcagaacttccaataaaattacttaaagatagaaatgaattatttacaaaattcatcaacgagttaaaaaagaccagttcattcaagataagcaaacgcgataaggatacgctactaaaatattttacttaggactggagttagaatttatagacgactcatttcgtttatcattattactaccatcattattagtattcttcttgttatcttgttcagaaatatacagcaatgctatgcctaatactaaatacattatcatgcttgcaatggctctaacaacgacgaaccaaaatgaatttggtcgtagcttttgttcacaaaaatacataaagaaatgtctacataaatctatggcgccattggctacttgaaatagcgccagtcctcctacagattttaatatagctgtataacatgacatttattcatcatcaaaagagacagagtcaccatctgtcatatttagattttttttcatgtgttcaaagtatcctctactcatttcattataatagtttatcatacttagaattttaggacggatcaatgagtaagacttgactagatcgtcagtagtaatttgtgcatcgtctattctgcatccgcttcgtcgaataatgtatagcatcgctttgagattctccatagctatcaagtctttatacaatgacatggaaatatctgtgaatactttatacttctccaacatcgatgccttaacatcatcgcctactttagcattgaaaatacgttctattgtgtagatggatgtagcaagatttttaaacaacaatgccatcttacacgatgattgcctcaagtctccaatcgtttgtttagaacgattagctacagagttcaacgcttggctgactagcatattattatctttagaaattgtattcttcaatgaagcgtttatcatatctgtgatttcgttagtcatattacagtctgactgggttgtaatgttatccaacatatcacctatggatacggtacacgtaccagcatttgtaataatcctatctaagatgttgtatggcattgcgcagaaaatatcttctcctgtaatatctccactctcgataaatctactcagattattcttaaatgccttattctctggagaaaagatatcagtgtccatcatttcattaatagtatacgcagaaaagataccacgagtatcaattctatccaagatacttatcggttccgagtcacagataatggtttcctctccttcgggagatcctgcatagaaatatctaggacaatagtttctatactgtctgtaactctgataatctctaaagtcactaactgataccatgaaattgagaagatcaaacgctgaagtaatcaatttttctgcctcgtttttactacaactagttttcatcaatgtagtgacgatgtattgtttagttactcttggtctaatactgatgatagagatattattacttcccataatggatcttctagtagtcaccttaaagcccattgatgcaaatagcagatagataaagtcttggtatgactcctttctaatatagtacggactacctttgtcacccaactttatacccacataagccataacaacctctttaatagccgtttcatgaggtttatcagccatgagcctgagtagttggaagaatctcatgaatcccgtctcagaaagtcctatatgcatgatagatttatctttcctgggaaactctcgtatagtcatagatgaaatactcttcaaagtttctgaaataagattagtaacagtcttacctccgactactctgggtaacaaacatactctaataggtgttttctctgcggagataatatcagaaaggatagagcaataagtagtattattgtgattataaagaccgaatacataacaggtagaatttataaacatcatgtcctgaaggtttttagacttgtattcctcgtaatccataccgtcccaaaacatggatttggtaactttgatagccgtagatctttgttccttcgccaacaggttaaagaaattaataaagaatttgttgtttctatttatgtccacaaattgcacgtttggaagcgtaactgttacgttcactgcagcattttgaggatcgcgagtatgaagtacgatgttattgtttactggtatatctggaaagaaatctaccagtctaggaataagagattgatatcgcatagaaatagtaaagtttataatctcatcatcgaagagcattttgttaccattgtaataaatatccactctgtcatatgtataaatgaagtactgttcaaacatgatgagatgtttatatgttggcatagtagtgagatcgacgtttggtaatggcaatgtattaagattaactccataatgtctagcagcatctgcgatgttataagtgtcgtcaaagcggggtcgatcttgtgctgttatatattgtctaacacctataagattatcaaaatcttgtctgcttaatacaccgttaacaatttttgccttgaattcttttattggtgcattaataacatccttatagaggatgttaaacaaataagtgttatcaaagttaagatctggatatttcttttctgctagaacatccattgagtcggagccatctggtttaatataaccaccgataaatctagctctgtattctgtatccgtcaatctaatattaagaaggtgttgagtgaaaggtggaagatcgtaaaagctgtgagtattaatgataggattagtttccgaactaatgttaattggggtattaataatatctatatttccagcgttaagtgtaacattaaacagttttaattcacgtgacgtggtatcaattaaataattaatgcccaatttggatatagcagcctgaagctcatcttgtttagttacggatcctaatgagttattaagcaatatatcgaacggatgaacgaaggttgttttaagttggtcacatactttgtaatctagacatagatgcggaagaacggtagaaactatacgaaataaatattcagagtcctctaattgatcaagagtaactattgacttaataggcatcatttatttagtattaaatgacgaccgtaccagtgacggatatacaaaacgatttaattacagagttttcagaagataattatccatctaacaaaaattatgaaataactcttcgtcaaatgtctattctaactcacgttaacaacgtggtagatagagaacataatgccgccgtagtgtcatctccagaggaaatatcctcacaacttaatgaagatctatttccagatgatgattcaccggccactattatcgaacgagtacaacctcatactactattattgacgatactccacctcctacttttcgtagagagttattaatatcggaacaacgtcaacaacgagaaaaaagatttaatattacagtatcgaaaaatgctgaagcaataatggaatctagatctatgataacttctatgccaacacaaacaccatccttgggagtagtttatgataaagataaaagaattcagatgttagaggatgaagtggttaatcttagaaatcaacgatctaatacaaaatcatctgataatttagataattttaccaaaatactatttggtaagactccgtataaatcaacagaagttaataagcgtatagccatcgttaattatgcaaatttgaacgggtcccccttatcagttgaggacttggatgtttgttcggaggatgaaatagatagaatctataaaacgattaaacaatatcacgaaagtagaaaacgaaaaattatcgtcactaacgtgattattattgtcataaacattatcgagcaggcattgctaaaactcggatttgaagaaatcaaaggactgagtaccgatatcacttcagaaattatcgatgtggagatcggagatgactgcgatgctgtagcatctaaactaggaatcggtaacagtccggttcttaatattgtattgtttatactcaagatattcgttaaacgaattaaaattatttaatttaatacattcccatatccagacaacaatcgtctggattaatctgttcctgtcgtctcataccggacgacatattaatctttttattagtaggcatctttttagatggtttctttttcccagcattaactgagtcgatacctagaagatcgtgattgatctctccgaccattccacgaacttctaattggccgtctctgacggtaccataaactattttaccagcattagtaacagcttggacaatctgaccatccattgcgttgaatgatgtagttgctgttgttctacgtttaggagcaccagaagtatttttggagcccttggaggctgatgtagaagaagacgaggattttgatttacatgtaatacattttgtactctttgattttgtatcacatgcgccggcagtcacatttgtttgagaattaagattattgttgcctcctttgacggctgcatctccaccgatttgcgctagtagatttttaagctgtggtgtaatcttattaactgtttcgatataatcatcgtaactgcttctaacggctaaattttttttatccgccatttagaagctaaaaatatttttatttatgcagaagatttaactagattatacaatgaactaatatgatccttttccagattatttacaaacttggtattttttggttctggaggaggcgaatttaaattcggacttggattcggattttgtgagttcttgatcttattatacatcgagtataggatggcgacggtaactgctacgcaaataccgatcaacaaaagaataccaatcatttattgacaataacttcactattgatcaagtatgcaatatatcatcttttcactaaataagtagtaataatgattcaacaatgtcgagatatatggacgataataatttagttcatggaaatatcgctatgattggtatgaatgactccgctaactctgtggggtgcgcagtgctttccccacatagaataaattagcattccgactgtgataataataccaagtataaacgccataatactcaatactttccatgtacgagtgggactggtagacttactaaagtcaataaaggcgaagatacacgaaagaatcaaaagaatgattccagcgattagcacgccggaaaaataatttccaatcataagcatcatgtccatttaactaataaaaattttaaatcgccgaatgaacaaagtggaatataaaccatataaaaacaatagtttgtactgcaaaaataatatctatttttgttttcgaagatatggtaaaattaaatagtagtacacagcatgttataactaacagcagcaacggctcgtaattacttatcatttactagacgaaaaggtggtgggatattttcttgctcaaataatacgaatatatcacccatccattttatgcgatgtttatatactctaatctttaatagatctatagacgacgggtttaccaacaatatagattttatcgattcatctaatttaaacccttccttaaacgtgaatgatctattatctggcataacgatgactctacctgatgaatcggacaatgtactgggccatgtagaataaattatcaacgaattatcgtctacgaacatttatatcatttgttttaattttaggacgcgaataaatggatataaaatagaaaataacagatattacaaccaatgttatggccgcgcccaaccaggtaggcagttttattttatcttttactacaggttctcctggatgtacgtcaccaacggcggacgtagttctagtacaattagacgtaagttctgcttgggaattttttaacgctaaagagttaacgttaatcgtgcacccaacgtatttacatctagttctttgaacatcttgattataatataaccattttctatctctagattcgtcggtgcactcatgtaaccaacataccctaggtcctaaatatttatctccggaattagattttggataattcgcgcaccaacaatttctatttcctttatgatcgttacaaaagacgtataatgccgtatccccaaaagtaaaataatcaggacgaataattctaataaactcagaacaatatctcgcatccatatgtttggagcaaatatcggaataagtagacatagccggtttccgttttgcacgtaaccattctaaacaattggggtttccaggatcgtttctacaaaatccagtcatgaaatcatcacaatgttctgtcttgtaattattattaaatatttttggacagtgtttggtatttgtcttagaacaacattttgccacgctatcactatcgcccaggagataatccttttttataaaatgacatcgttgcccggatgctatataatcagtggcgtgttttaaatccttaatatattcaggagttacctcgttctgataatagattaatgatccaggacgaaatttgaaagaactacatggttctccatgaattaatacatattgtttagcaaattcaggaactataaaactactacaatgatctatcgacataccatctatcaaacaaaacttgggtttaatttctcccggagatgtttcataatagtacgtataactttcttctgcaaacttaacagctctattatattcaggataattaaaacctaattccatatatttgtctcgtatatctgctattcctggtgctattttaattctattaagagtaacggctgcccccattcttaataatcgtcagtatttaaactgttaaatgttggtatatcaacatctaccttatttcccgcagtataaggtttgttgcaggtatactgttcaggaatggttacatttatacttcttctatagtcctgtctttcgatgttcatcacatatgcaaagaacagaataaacaaaataatgtaagaaataatattaaatatctgtgaattcgtaaatacattgattgccataataattacagcagctacaatacatacaatagacattcccacagtgttgccattacctccacgatacatttgagttactaagcaataggtaataactaagctagtaagaggcaatagaaaagatgagataaatatcatcaatatagagattagaggagggctatatagagccaagacgaacaaaatcaaaccgagtaacgttctaacatcattatttttgaagattcccaaataatcattcattcctccataatcgttttgcattatacctccatctttaggcataaacgattgctgctgttcctctgtaaataaatctttatcaagcactccagcacccgcagagaagtcgtcaagcatattgtaatatcttaaataactcatttatatattaaaaaatgtcactattaaagatggagtataatctttatgccgaactaaaaaaaatgacttgtggtcaacccctaagtctttttaacgaagacggggatttcgtagaagttgaaccgggatcatcctttaagtttctgatacctaagggattttacgcctctccttccgtaaagacgagtctagtattcgagacattaacaacgaccgataataaaatcactagtatcaatccaacaaatgcgccaaagttatatcctcttcaacgcaaagtcgtatctgaagtagtttctaatatgaggaaaatgatcgaatcaaaacgtcctctatacattactcttcacttggcgtgtggatttggtaagactattaccacgtgttatcttatggctacacacggtagaaaaaccgtcatttgcgtacccaataaaatgttaatacatcaatggaagacacaggtagaggcagtcggattggaacataagatatctatagatggagtaagtagtctattaaaggaactaaagactcaaagtccggatgtattaatagtagtcagtagacatctgacaaacgatgccttttgtaaatatatcaataagcattatgatttgttcatcttggatgaatcacatacgtataatctgatgaacaatacagcagttacaagatttttagcgtattatcctccgatgatgtgttattttttaactgctacacctagaccagctaaccgaatttattgtaacagtattattaatattgccaagttatccgatctaaaaaaaactatctatgcggtagatagtttttttgagccatattccacagacaatattagacatatggtaaaacgactagatggaccatctaataaatatcatatatatactgagaagttattatctgtagacgagcctagaaatcaacttattcttgataccctggtagaagaattcaagtcaggaactattaatcgaattttagttattactaaactacgtgaacatatggtattcttctacaaacgattattagattttttcggatcagaggttgtatttataggagacgcccaaaatagacgtactccagatatggtcaaatcaatcaaggaactaaatagatttatattcgtatccaccttattttattccggtactggtttagatattcctagtttggattcgttgttcatttgctcggcagtaatcaacaatatgcaaatagagcaattactagggagggtatgtcgagaaacagaactattagataggacggtatatgtatttcctaacacatccatcaaagaaataaagtacatgataggaaatttcatgcaacgaattattagtctgtctgtagataaactaggatttaaacaaaaaagttatcggaaacatcaagaatccgatcccacttctgtatgtacaacatcctccagagaagaacgtgtattaaatagaatatttaactcgcaaaatcgttaagaagtttaagcgacgatccgcatgctgcgcaggccagtgtattacccctcatagtattaatataatccaatgatacttttgtgatgtcggaaatcttaaccaatttagactgacaggcagaacacgtcatgcaatcatcatcgtcatcgataactgtagtcttgggcttctttttgcggctcttcattccggaacgcacattggtgctatccatttaggtagtaaaaaataagtcagaatatgccctatagcacgatcgtgcaaaacctggtatatcgtctctatctttatcacaatatagtgtatcgacatttttattattattgacctcgtttatcttggaacatggaatgggaacatttttgttatcaacggccatctttgccttaattccagatgttgtaaaattataactaaacagtctatcatcgacacaaatgaaattcttgtttagacgtttgtagtttacgtatgcggctcgttcgcgtctcattttttcagatattgcaggtactataatattaaaaataagaatgaaataacataggattaaaaataaagttatcatgacttctagcgctgatttaactaacttaaaagaattacttagtctgtacaaaagtttgaaattttcagattctgcggctatagaaaagtataattctttggtagaatggggaacatctacttactggaaaataggcgtgcaaaaggtagctaatgtcgagacgtcaatatctgattattatgatgaggtaaaaaataaaccgtttaatattgatccgggatattacattttcttaccggtatattttggaagcgtctttatttattcgaagggtaaaaatatggtagaacttggatctggaaactcttttcaaataccagatgatatgcgaagtgcgtgtaacaaagtattagacagcgataacggaatagactttctgagatttgttttgttaaacaatagatggataatggaagatgctatatcaaaatatcagtctccagttaatatatttaaactagctagtgagtacggattaaacatacccaaatatttagaaattgaaatagaggaagacacattatttgacgacgagttatactctattatagaacgctctttcgatgataaatttccaaaaatatccatatcgtatattaagttgggagaacttagacggcaagttgtagactttttcaaattctcgttcatgtatattgagtccatcaaggtagatcgtataggagataatatttttattcctagcgttataacaaaatcaggaaaaaagatattagtaaaagatgtagaccatttaatacgatccaaggttagagaacatacatttgtaaaagtaaaaaagaaaaacacattttccattttatacgactatgatggaaacggaacagaaactagaggagaagtaataaaacgaattatagacactataggacgagactattatgttaacggaaagtatttctctaaggttggtagtgcaggcttaaagcaattgactaataaattagatattaatgagtgcgcaactgtcgatgagttagttgatgagattaataaatccggaactgtaaaacgaaaaataaaaaaccaatcagcatttgatttaagcagagaatgtttgggatatccagaagcggattttataacgttagttaataacatgcggttcaaaatagaaaattgtaaggttgtaaatttcaatattgaaaatactaattgtttaaataacccgagtattgaaactatatatggaaactttaaccagttcgtctcaatctttaatatcgtcaccgatgtcaaaaaaagattattcgagtgaaataatatgcgcctttgatataggtgcaaaaaatcctgccagaactgttttagaagtcaaggataactccgttagggtattggatatatcaaaattagactggagttctgattgggaaaggcgcatagctaaagatttgtcacaatatgaatacactacagttcttctagaacgtcagcctagaaggtcgccgtacgtcaaatttatctattttattaaaggctttttatatcatacatcggctgccaaagttatttgcgtctcgcctgtcatgtctggtaattcatatagagatcgaaaaaagagatcggtcgaagcatttcttgattggatggacacattcggattgcgagactccgttccggatagacgcaaattagacgatgtagcggatagtttcaatttggctatgagatacgtattagataaatggaatactaattatacaccttataataggtgtaaatctagaaattacataaaaaaaatgtaataacgttagtaacgccattatggataatctatttacctttctacatgaaatagaagatagatatgccagaactatttttaactttcatctaataagttgcgatgaaataggagatatatatggtcttatgaaagaacgcatttcctcagaggatatgtttgataatatagtgtataataaagatatacatcatgccattaagaaactagtgtattgcgacatccaacttactaaacacattattaatcagaatacgtatccggtatttaacgattcttcacaagtgaaatgttgtcattatttcgacataaactcagataatagcaatattagctctcgtacagtagagatatttgagagggaaaagtcatctcttgtatcatatattaaaactaccaataagaagagaaaggtcaattacggcgaaataaagaaaactgttcatggaggcactaatgcaaattacttttccggtaaaaagtctgacgagtatctgagtactacagttagatccaacattaatcaaccttggatcaaaaccatctctaagaggatgagagttgatatcattaatcactctatagtaacgcgtggaaaaagctctatattacaaactatagaaattatttttactaatagaacatgtgtgaaaatattcaaggattctactatgcacattattctatccaaggacaaggatgaaaaggggtgtatacacatgattgacaaattattctatgtctattataatttatttctgttgttcgaggatatcatccaaaacgagtactttaaagaagtagctaatgttgtaaaccacgtacttacggctacggcattagatgagaaattattcctaattaagaaaatggctgaacacgatgtttatggagttagcaatttcaaaatagggatgtttaacctgacatttattaagtcgttggatcataccgttttcccctctctgttagatgaggatagcaaaataaagttttttaaggggaaaaagctcaatattgtagcattacgatctctggaggattgtataaattacgtgactaaatccgagaatatgatagaaatgatgaaggaaagatcgactattttaaatagcatagatatagaaacggaatcggtagatcgtctaaaagaattgcttctaaaatgaaaaaaaacactgattcagaaatggatcaacgactcggatataagtttttggtgcctgatcctaaagccggagttttttatagaccgttacatttccaatatgtatcgtattctaattttatattgcatcgattgcatgaaatcttgaccgtcaagcggccactcttatcgtttaagaataatacagaacgaattatgatagaaattagcaatgttaaagtgactcctccagattactcacctataatcgcgagtattaaaggtaagagttatgacgcattagccacgttcactgtaaatatctttaaagaggtaatgaccaaagagggtatatccatcactaaaataagtagttatgagggaaaagattctcatttgataaaaattccgctactaataggatacgggaataaaaatccacttgatacagccaagtatcttgttcctaatgtcataggtggagtctttatcaataaacaatctgtcgaaaaagtaggaattaatctagtagaaaagattacaacatggccaaaatttagggttgttaagccaaactcattcactttctcgttttcctccgtatcccctcctaatgtattaccgacaagatatcgccattacaagatatctctggatatatcacaattggaagcgtcgaatatatcatcgacaaagacatttataacggtcaatattgttttgctgtctcaatatttatctagagtgagtctagaattcattagacgtagcttatcatacgatatgcctccagaagttgtctatctagtaaacgcgataatagatagtgctaaacgaattactgaatctattactgactttaatattgatacatacattaatgacctggtggaagctgaacacattaaacaaaaatctcagttaacgatcaacgagttcaaatatgaaatgctgcataactttttacctcatatgaactatacacccgatcaactaaagggattttatatgatatctttactaagaaagtttctctactgtatctaccacacttctagatatccagatagagattcgatggtttgtcatcgtatactaacatacggcaaatattttgagacgttggcacatgatgaattagagaattacataggcaacatccgaaacgatatcatgaacaatcacaagaacagaggcacttacgcggtaaacattcatgtactaacaactcctggacttaatcatgcattttctagtctattgagtggaaagttcaaaaagtcagacggtagttatcgaacacatcctcactattcatggatgcagaatatttctattcctaggagtgttggattttatccggatcaagtaaagatttcaaagatgttttctgtcagaaaataccatccaagtcaatatctttacttttgttcatcagacgttccggaaagaggtcctcaggtaggtttagtatctcaattgtctgtcttgagttccattacaaatatactaacgtctgagtatttggatttggaaaagaaaatttgtgagtatatcagatcatattataaagatgatataagttactttgaaacaggatttccaatcactatagaaaatgctctagtcgcatctcttaatccaaatatgatatgtgattttgtaactgactttagacgtagaaaacggatgggattcttcggtaacttggaggtaggtattactttagttagggatcacatgaatgaaattcgcattaatattggagcgggaagattagtcagaccattcttggttgtggataacggagagctcatgatggatgtgtgtccggagttagaaagcagattagacgacatgacattctctgacattcagaaagagtttccgcatgtcatcgaaatggtagatatagaacaatttacttttagtaacgtatgtgaatcggttcaaaaatttagaatgatgtcaaaggatgaaagaaagcaatacgatttatgtgactttcctgccgaatttagagatggatatgtggcatcttcattagtgggaatcaatcacaattctggacccagagctattcttggatgtgctcaagctaaacaagctatctcttgtctgagctcggatatacgaaataaaatagacaatggaattcatttgatgtatccagagaggccaatcgtgattagtaaggctttagaaacttcaaagattgcggctaattgcttcggccaacatgttactatagcattaatgtcgtacaaaggtatcaatcaagaggatggaattatcatcaaaaaacaatttattcagagaggcggtctcgatattgttacagccaagaaacatcaagtagaaattccattggaaaactttaataacaaagaaagagataggtctaacgcctattcaaaattagaaagtaatggattagttagactgaatgctttcttggaatccggagacgctatggcacgaaatatctcatcaagaactcttgaagatgattttgctagagataatcagattagcttcgatgtttccgagaaatataccgatatgtacaaatctcgcgttgaacgagtacaagtagaacttactgacaaagttaaggtacgagtattaaccatgaaagaaagaagacccattctaggagacaaatttaccactagaacgagtcaaaagggaacagtcgcgtatgtcgcggatgaaacggaacttccatacgacgaaaatggtatcacaccagatgtcattattaattctacatccatcttctctagaaaaactatatctatgttgatagaggttattttaacagccgcatattctgctaagccgtacaacaataagggagaaaaccgacctgtctgttttcctagtagtaacgaaacatccatcgatacatatatgcaattcgctaaacaatgttatgagcattcaaatccgaaattgtctgatgaagaattatcggataaaatcttttgtgaaaagattctctatgatcctgaaacggataagccttatgcatccaaagtattttttggaccaatttattacttgcgtctgagacatttaactcaggacaaggcaaccgttagatgtagaggtaaaaagacgaagctcattagacaggcgaatgagggacgaaaacgtggaggaggtatcaagttcggagaaatggagagagactgtttaatagcgcatggtgcagccaatactattacagaagttttgaaagattcggaagaagattatcaagatgtgtatgtttgtgaaaattgtggagacatagcagcacaaatcaagggtattaatacatgtcttagatgttcaaaacttaatctctctcctctcttaacaaaaattgataccacacacgtatctaaagtatttcttactcaaatgaacgccagaggcgtaaaagtcaaattagatttcgaacgaagacctccttcgttttataaaccattagataaagttgatctcaaaccgtcttttctggtctaatattgtttagtagatacttatcaacatcatcaagattatcaagattatcaagattatcaagataagctaattcactaaacacattatcgatttcggtatcgttactcgcagaataaagttcgttatgatcctgatattcggaaatctgtggagtttcaggttttggtggatgtgtaacagctacttgagataccgaagtctgatattcagaaagctgtggatgttctggttcggcatccaccgatggtgttacaccactactaattggttcagtaacgtctgtggacgatggaggcaccacttctacaggttctggttctttatcctcagtcatcaacggagctacttcaatgcgaggaaatgtataatttggtaatggtttctcatgtggatctgaagaagaggtaagatatctactagaaagataccgatcacgttctagttctcttttgtagaacttaactttttctttctcagcatctagttgatattccaacctcttcacgttactacgttcagatttcaattcacgttcgcatgggttacctccgcagtttttacgagcgatttcacgttcagccttcatgcgtctctccctctctctatcgagtttatcagagcagtctttctgaaggcgatcgaactccataaatttctccaacgctttgattgtttccatagatttccgaagttcagcttttaggactgtgattctttttctttcgaattcacagctggatgtacaaccgtttccattaccgccatctctaagtttcttttctagatcggcaacatttcatccccatgccttttacattcctcgagtctactgtcgtcgaaatatcgttccagctccttttcgacatcaataactttagcacgttgtctctcaagctctcttttgtagttatctgattccctggcacgtttaagatcttcatgcaattgagtcagctcttaacacaatctcttgcttcttcgtcatagtacgcgcaatcactgtgagatccattgttaccacgtctacactcggcgagctcgcgtttaagagattcaatttcccgtttgtattggtccatgtttccattgctaccaccattagatttacaggctgctagttgtcgttcgagatcagaaatacgggttttcttggaattgatttcgtcgatgtacttggcatcgaaacacttattaagttctttttccaattctacgattttatttctttcgcgagtcaattccctcctgtagtaactatctgttttgtcagattcacgctctctacgtagactttcttgcaagttactaatttgttccctagcacgtccgagtttagttttatatgctgaatagagttctgattcatcctttgagcagatctctagcgatcgtttaagattcctgattctagtctttagcctatttacctcctcagaagatgttccgttaccgttgcgtttacactcgttaagctgtctatcaagatccatgattctatctctaagacgttgcatctctctttccatatcagcattgctttcattattacgtctgcagtcactcaactgtctttcaatatctgagattctatctctaagacgtcgcatctctctctgtttcggcattggtttcattattacgtctacagtcgttcaactgtctttcaagatctgatattctagattggagtctgctaatctctgtagcattttcacggcattcactcagttgtctttcaagatctgaaattttagattggagtctgctaatctctgtaagatttcctcctccgctctcgatgcagtcggtcaacttattctctagttctctaatacgcgaacgcagtgcatcaacttcttgcgtgtcttcctggttgcgtgtacattcatcgagtctagattcgagatctctaacgcgtcgtcgttcttcctcaagttctctgcgtactacagaaagcgtgtccctatcttgttgatatttagcaatttctgattctagagtactgattttgcttacgtagttactaatatttgtcttggccttatcaagatcctccttgtatttgtcgcattccttgatatccctacgaagtctggacagttcccattcgacattacgacgtttatcgatttcagctcggagatcgtcatcgcgttgttttagccacatacgactgagttcaagttctcgttgacaagatccatctacttttccattcctaatagtatccagttccttttctagttctgaacgcatttctcgttccctatcaagcgattctctcaattctcggatagtcttcttatcaatttctaataaatctgaaccatcatctgtcccattttgaatatccctgtgttctttgatctcttttgtaagtcggtcgattctttcggttttataaacagaatccctttccaaagtcctaatcttactgagtttatcactaagttctgcattcaattcggtgagttttctcttggcttcttccaactctgttttaaactctccactatttccgcattcttcctcgcatttatctaaccattcaattagtttattaataactagttggtaatcagcgattcctatagccgttcttgtaattgtgggaacataattaggatcttctaatggattgtatggcttgatagcatcatctttatcattattagggggatggacaaccttaattggttggtcctcatctcctccagtagcgtgtggttcttcaatagccgtgttagtaataggcttaggcaaatgcttgtcgtacgcgggcacttcctcatccatcaagtatttataatcgggttctacgtctgaatattcttttctaagagacgcaacttctggagttagtagaagaactctgtttctatatctatcaacgctggaatcaatactcaagttaaggatagcgaatacctcatcgtcatcatccgtatcctctgaaacgccatcatatgacatttcatgaagtctaacgtattgataaacagaatcagatttagtattaaacagatccttaacctttttagtaaatgcatatgtatattttagatctccagatttcataatatggtcgcatgccttaaatgtcagtgcttccataatatagtctggaacactaattggtgatgaaaaagataccggaccatatgctacgttgataaataactctgagccactaactagataatgattaatgttaaggaagaggaaatattcagtgtataggtatgtcttggcgtcatatcttgtactaaacacgctaaacagtttgttaatgtgatcaatttccaatagattaattagagcagcaggaataccaacaaacatattaccacatccgtattttctatgaatatcacatatcatgttaaaaaatcttgatagaagagcgaatatctcgtctgacttaatgagtcgtagttcagcagcaacataagtcataactgtaaatagaacatactttcctgtagtgttgattctagactccacatcaacaccattattaaaaatagttttatatacatctttaatctgctctccgttaatcgtcgaacgttctagtatacggaaacactttgatttcttatctgtagttaatgacttagtgatatcacgaagaatattacgaattacatttcttgtttttcttgagagacctgattcagaactcaactcatcgttccatagtttttttacctcagtggcgaaatctttggagtgcttggtacatttttcaataaggttcgtgacctccatttattataaaaaaattttattcaaaacttaactacaatcgggtaattataaaatcgtagatctcccatgtggtggaatactaccatctatcgcatgtggatggacagtaggtaatggccatgggaacagtaatgtttgcatatttatctttcttgccagtattactgcatattgtcccaatgtttcgatgtgatgttctaacctatcaactgccgctgtatcacaacaatagtgtccgatgaaattaagattatgatccaatgtgtttaatatatgattatcaagtcttatacgatccgcgtcttttttgacaggatcaggttcttctacaggaagaagtttcggcctcttatgatattcatgtctgggaaacggtggtctagggtgaggctccggtatcggagtgggttttggattataatcatcatcgtctatgacatcatcttcgacttcgatatttattttgctatcttgatgatgtcctgtatcagttgcattttcagcactcgactgaatattagcgcattcattgtttattattaccatatttctaaacccaaaatgtatatgttgaacatcagtactatcgttgatgagtcttatagcatgaattcgcttatcgttatcgggtttagcttctgtcaccttagcaattccttttttattaaactctacataatcatatccatttctattgtttgttctaatataaacgagtatagcatcattgctaaatttttcaatagtatcgaaaacagaatatcctaaaccatataatatatattcaggaacactcaaactaaatgtccaggattctcctaaatacgtaaactttaatagtgcgaaatcattcaaaaatctaccacttatagatagatagtacataaatgcgtatagtagtctacctatctctttattatgaaaaccggcattacgatcatatatgtcgtgatatacctgtgatccgtttacgttaaaccataaatacatgggtgatcctataaacatgaatttatttctaattctcagagctatagttaattgaccgtgtaatatttgcttacatgcatacttgatacgctcattaataagatttttatcattgctcgttatctcagaatcgtatatataaggagtaccatcgtgattcttaccagatattatacaaaatactatatataaaatatattgaccaacgttagtaatcatataaatgtttaacgttttaaattttgtattcaatgatccattatcatacgctagcatggtcttatgatattcattctttaaaatataatattgtgttagccattgcattggggctcctaatggagattttttattctcatccattttaggataggctttcataaagtccctaataacttcgtgaataatgtttctatgttttctactgatgcatgtatttgcttcgatttttttatcccatgtttcatctatcatagatttaaacgcagtaatgctcgcaacattaacatcttgaaccgttggtacaattccgttccataaatttataatgttcgccatttatataactcattttttgaatatacttttaattaacaaaagagttaagttactcatatggacgccgtccagtctgaacatcaatctttttagccagagatatcatagccgctcttagagtttcagcgtgattttccaacctaaatagaacttcatcgttgcgtttacaacacttttctatttgttcaaactttgttgttacattagtaatctttttttccaaattagttagccgttgtttgagagtttcctcattgtcgtcttcatcggctttaacaattgcttcgcgtttagcctctggctttttagcagcctttgtagaaaaaaattcagttgctggaattgcaagatcgtcatctccggggaaaagagttccgtccatttaaagtacagattttagaaactgacactctgcgttatttatatttggtacaacacatggattataaatattgatgttaataacatcagaaaatgtaaagtctatacattgttgcatcgtgttaaattttctaatggatctagtattattgggtccaacttctgcctgaaatccaaatatggaagcggatacaaaaccgtttcctggataaaccacacatctccacttttgctttacatcagaaattgtgtcattgacatcttgaactctcctatctaatgccggtgttccacctatagattttgaatattcgaatgctgcatgagtagcattaaattccttaatattgccataattttcatatattgagtaaccctggataaaaagtaaacacaccgcagccgtcgctaccacaataaaaaaaattgatagagagttcatttataatctattagaagctgacaaaatttttttacacgcatcagacaatgctttaataaatagttcaacatctacttttgtcatatcgaaccgatggtatgattctaacctagaattacatccgaaaaagttgactatgttcatagtcattaagtcattaacaaacaacattccagactctggattataagacgatactgtttcgtcacaattacctaccttaatcatgtgattatgaatattggctattagagcaccttctaagaaatctataatatctttgaaacacgatttaaaatcaaaccacgaatatacttctacgaagaaagttagtttacccataggagaaataactataaatggagatctaaatacaaaatccggatctatgatagttttaacattattatattctctattaaatacctccacatctaaaaatgttaattttgaaactatgtcttcgtttattaccgtacctgaactaaacgctataagctctattgtttgagaactctttaaacgatattcttgaaatacatgtaacaaagtttcctttaactcggtcggtttatctaccatagttacagaatttgtatccttatctataatataataatcaaaatcgtataaagttatataattatcgcgttcagattgtgatcttttcaaatagactaaaaaccccatttctctagtaagtatcttatgtatatgtttgtaaaatatcttcatggtgggaatatgctctaccgcagttagccattcctcattgacagcggtagatgtattagacaaaactattccaatgtttaacaagggccattttacgagattattaaatccttgtttgataaatgtagccaatgagggttcgagttcaacgacgattgaattctcttcccgcggatgctgcatgatgaacgacgggatgttgttcgattgatttggaattctttttcgactttttgtttatattaaatattttaaaatttatagctgatagcaattcatgtactacggataatgtagacgcgtattgcgcatcgatatctttattattagataaatttatcaataaatgtgagaagtttgcctcgttaaggtcttccatttaaatattatataaacatttgtgtttgtatcttattcgtcttttatggaatagttttttactagtaaagctgcaattacacactttgtccgtaaaacataaatataaacaccagcttttatcaatcgttccaaaaagtcgacggcggacatttttaacatggcatctattttaaatacacttaggtttttggaaaaaacatcattttataattgtaacgattcaataactaaagaaaagattaagattaaacataagggaatgtcatttgtattttataagccaaagcattctaccgttgttaaatacttgtctggaggaggtatatatcatgatgatttggttgtattggggaaggtaacaattaatgatctaaagatgatgctattttacatggatttatcatatcatggagtgacaagtagtggagcaatttacaaattgggatcgtctatcgatagactttctctaaataggactattgttacaaaagttaataattatgatgatacattttttgacgacgatgattgatcgctattgcacaattttgtttttttactttctaatatagcgtttagattctttttcatgtgcgaatattgatttactaaaatatcgatgtttaacttttgttctatgacgtccttatcagcggtatcggtacatatacgtaattcaccttcacaaaatacggagtcttcgataataatagccaatcgattattggatctagcggtctgtatcatattcaacatgtttaatatatcctttcgtttcccctttacaggcatcgatcgtagcatattttccgcgtctgagatggaaatgttaaaactacaaaaatgcgtaatgttagcccgtcctaatattggtacgtgtctataagtttggcatagtagaataatagacgtgtttaaatgccttccaaagtttaagaattctattagagtattgcattttgatagtttatcgcctacatcatcaaaaataagtaaaaagtgtgctgattttttatgattttgtgcgacagcaatacatttttctatgttacttttagttcgtatcagattatattctagagattcctgactactaacgaaattaatatgatttggccaaatgtatccatcataatctggattataaacgggtgtaaacaagaatatatgtttatattttttaactagtgtagaaaacagagatagtaaatagatagtttttccagatccagatcctcccgttaaaaccattctaaacggcatttttaataaattttctcttgaaaattgtttttcttggaaacaattcataattatatttacagttactaaattaatttgataataaatcaaaatatggaaaactaaggtcgttagtagggaggagaacaaagaaggcatatcgtgatataaataacatttattatcatgatgacaccagaaaacgacgaagagcagacatctgtgttctccgctactgtttacggagacaaaattcagggaaagaataaacgcaaacgcgtgattggtctatgtattagaatatctatggttatttcactactatctatgattaccatgtccgcgtttctcatagtgcgcctaaatcaatgcatgtctgctaacgaggctgctattactgacgccgctgttgccgttgctgctgcatcatctactcatagaaaggttgcgtctagcactacgcaatatgatcacaaagaaagctgtaatggtttatattaccagggttcttgttatatattacattcagactaccagttattctcggatgctaaagcaaattgcactgcggaatcatcaacactacccaataaatccgatgtcttgattacctggctcattgattatgttgaggatacatggggatctgatggtaatccaattacaaaaactacatccgattatcaagattctgatatatcacaagaagttagaaagtatttttgtgttaaaacaatgaactaatatttatttttgtacattaataaatgaaatcgcttaatagacaaactgtaagtaggtttaagaagttgtcggtgccggccgctataatgatgatactctcaaccattattagtggcataggaacatttctgcattacaaagaagaactgatgcctagtgcttgcgccaatggatggatacaatacgataaacattgttatctagataccaacattaaaatgtctacagataatgcggtttatcagtgtcgtaaattacgagctagattgcctagacctgatactagacatctgagagtattgtttagtattttttataaagattattgggtaagtttaaaaaagaccaataataaatggttagatattaataatgataaagatatagatattagtaaattaacaaattttaaacaactaaacagtacgacggatgctgaagcgtgttatatatacaagtctggaaaactggttgaaacagtatgtaaaagtactcaatctgtactatgtgttaaaaaattctacaagtgacaacaaaaaatgaattaataataagtcgttaacgtacgccgccatggacgccgcgtttgttattactccaatgggtgttgactataacagatacattgtatgatgatctcgatatctcaatcatggactttataggaccatacattataggtaacataaaaactgtccaaatagatgtacgggatataaaatattccgacatgcaaaaatgctactttagctataagggtaaaatagttcctcaggattctaatgatttggctagattcaacatttatagcatttgtgccgcatacagatcaaaaaataccatcatcatagcatgcgactatgatatcatgttagatatagaagataaacatcagccattttatctattcccatctattgatgtttttaacgctacaatcatagaagcgtataacctgtatacagctggagattatcatctaatcatcaatccttcagataatctgaaaatgaaattgtcgtttaattcttcattctgcatatcagacggcaatggatggatcataattgatgggaaatgcaatagtaattttttatcataaaagttgtaaagtaaataataaaacaataaatattgaactagtagtacgtatattgagcaatcagaaatgatgctggtacctcttatcacggtgaccgtagttgcgggaacaatattagtatgttatatattatatatttgtaggaaaaagatacgtactgtctataatgacaataaaattatcatgacaaaattaaaaaagataaagagttctaattccagcaaatctagtaaatcaactgatagcgaatcagactgggaggatcactgtagtgctatggaacaaaacaatgacgtagataatatttctaggaatgagatattggacgatgatagcttcgctggtagtttaatatgggataacgaatccaatgttatggcgcctagcacagaacacatttacgatagtgttgctggaagcacgctgctaataaataatgatcgtaatgaacagactatttatcagaacactacagtagtaattaatgaaacggagactgttaaagtacttaatgaagataccaaacagaatcctaactattcatccaatcctttcgtaaattataataaaaccagtatttgtagcaagtcaaatccgtttattacagaacttaacaataaatttagtgagaataatccgtttagacgagcacatagcgatgattatcttaataagcaagaacaagatcatgaacacgatgatatagaatcatcggtcgtatcattggtgtgattagtttcctttttataaaattgaagtaatatttagtattattgctgccgtcacgttgtacaaatggagatattccctgtattcggcatttctaaaattagcaattttattgctaataatgactgtagatattatatagatacagaacatcaaaaaattatatctgatgagatcaatagacagatggatgaaacggtacttcttaccaacatcttaagcgtagaagttgtaaatgacaatgagatgtaccatcttattcctcatagattatcgacgattatactctgtattagttctgtcggaggatgtgttatctctatagataatgacgtcaatggcaaaaatattctaacctttcccattgatcatgctgtaatcatatccccactgagtaaatgtgtcgtagttagcaagggccctacaaccatactggttgctaaagcggatatacccagcaaacgattggtaacatcgtttacaaacgacatactgtatgtaaacaatctatcactgattaattatttgccgttgtctgtattcattattagacgagtcaccgactatttggatagacacatatgcgatcagatatttgctaataataagtggtattcccttataaccatcgacgataagcaatatcctattccatcaaattgtataggtatgtcttctgccaagtacataaattctagcatcgagcaagatactttaatacatgtttgtaacctcgagcatccattcgacttagtatacaaaaaaatgcagtcgtacaattctgtacctatcaaggaacaaatattgtacggtagaattgataatataaatatgagcattagtatttctgtggattaatagatttctagtatggggatcattaatcatctctaatctctaaatacctcataaaacgaaaaaaaagctattatcaaatactgtacggaatagattcattctcttctctttttatgaaactctgttgtatatctactgataaaactggaagcaaaaaatctgataaaaagaataagatcaagatcaaggattatatggaacacgattattataaaataacaatagttcctggttcctcttccacgtctactagctcgtggtattatacacatgcctagtaatagtctctttgcgttgatggaaagcagactagaaataacaggctaaaatgttcagacaccataatagttcccaacccagataataacagagtaccatcaacacattcctttaaactcaatcccaaacccaaaaccgttaaaatgtatccggccaattgatagtagataatgaggtgtacagcgcatgataatttacacagtaaccaaaatgaaaatactttagtaattataagaaatatagatggtaacgtcatcatcaacaatccaataatatgccggagagtaaacattgacggataaaacaaaaatgctccgcataactctatcatggcaataacacaaccaaatacttgtaagattcctaaattagtagaaaatacaacggatatcgatgtataagtgatctcgagaaataataagaataaagtaatgcccgtaaagataaacatcaacattgtttggtaatcattaaaccaattagtatgacgttgaactaatttcacagtaaattttattccagtattatccccgcatgtataagtacctggtaagatatctttatattccataatcaatgagacatcactatctgataacgaatgaagtctagcactagtatgccatttacttaatattgtcgtcttggaagttttattataagttaaaatatcatggttatccaatttccatctaatatactttgtcggattatctatagtacacggaataatgatggtatcattacatgctgtatactctatggtctttgtagttgttataacaaccaacgtatagaggtatatcaacgatattctaactcttgacattttttatttatttaaaatgatacctttgttatttattttattctattttgctaacggtattgaatggcataagtttgaaacgagtgaagaaataatttctacttacttattagacgacgtattatacacgggtgttaatggggcggtatacacattttcaaataataaactaaacaaaactggtttaactaataataattatataacaacatctataaaagtagaggatgcggataaggatacattagtatgcggaaccaataacggaaatcccaaatgttggaaaatagacggttcagacgacccaaaacatagaggtagaggatacgctccttatcaaaatagcaaagtaacgataatcagtcacaacggatgtgtactatctgacataaacatatcaaaagaaggaattaaacgatggagaagatttgacggaccatgtggttatgatttattcacggcggataacgtaattccaaaagatggtttacgaggagcattcgtcgataaagacggtacttatgacaaagtttacattcttttcactgatactatcggctcaaagagaattgttaaaattccgtatatagcacaaatgtgcctaaacgacgaaggtggtccatcatcgttgtctagtcatagatggtcgacgtttctcaaagtcgaattagaatgtgatatcgacggaagaagttatagataaattattcattctaaaactataaaaacagataatgatacgatactatatgtattcttcgatagtccgcattatgtacctattctatgaataccattaaacaatctttttctacgtcaaaattggaaggatatacaaagcaattgccgtctccagctcctggtatatgtctaccagctggaaaagttgttccacataccacgtttgaagtcatagaaaaatataatgtactagatgatattataaagcctttatctaaccaacctatcttcgaaggaccgtctggtgttaaatggttcgatataaaggagaaggaaaatgaacatcgggaatatagaatatacttcataaaagaaaattctatatattcgttcgatacaaaatctaaacaaactcgtagctcgcaagtcgatgcgcgactattttcagtaatggtaacttcgaaaccgttatttatagcagatatagggataggagtaggaatgccacaaatgaaaaaaatacttaaaatgtaatcttaatcgagtacaccacacgacaatgaacaaacataagacagattatgctggttatgcttgctgcgtaatatgcggtctaattgttggaattatttttacagcgacactattaaaagttgtagaacgtaaattagttcatacaccatcaatagataaaacgataaaagatgcatatattagagaagattgtcctactgactggataagctataataataaatgtatccatttatctactgatcgaaaaaacctgggaggaaggacgtaatgcatgcaaagctctaaatccaaattcggatctaattaagatagagactccaaacgagttaagttttttaagaagccttagacgaggctattgggtaggagaatccgaaatattaaaccagacaaccccatataattttatagctaaaaatgccacgaagaatggaactaaaaaacggaaatatatttgtagtacaacgaatactcccaaactgcattcgtgttacactatataacaattacactacatttttatcataacactacttcggttagatgttttagaaaaaaataaatatcgccgtaccgttcttgtttttataaaaataacaattaacaattatcaaattttttctttaatattttacgtggttgaccattcttggtggtaaaataatctcttagtgttggaatggaatgctgtttaatgtttccgcactcatcgtatattttgacgtatgcagtcacatcgtttacgcaatagtcagactgtagttctatcatgcttcctacatcagaaggaggaacagttttaaagtctcttggttttaatctattgccattagttttcatgaaatcctttgttttatccacttcacattttaaataaatgtccactatacattcttctgttaattttactagatcgtcatgggtcatagaatttataggttccgtagtccatggatccaaactagcaaacttcgcgtatacggtatcgcgattagtgtatacaccaactgtatgaaaattaagaaaacagtttaataaatcaacagaaatatttaatcctccgtttgatacagatgcgccatatttatggatttcggattcacacgttgtttgtctgaggtgttcgtctagtgttgcttctacgtaaacttcgattcccatatattctttattgtcagaatcgcataccgatttatcatcatacactgtttgaaaactaaatggtatacacatcaaaataataaataataacgagtacattctgcaatattgttatcgtaattggaaaattagtgttcgagtgagtcggattatgtgagtactggattgtatattttattttatattttgtaataagaataaaatgctaatgtcaagtttattccaatagatgtcttattaaaaaacatatataataaataacaatggctgaatggcataaaattatcgaggatatctcaaaaaataataagttcgaggatgccgccatcgttgattacaagactacaaagaatgttctagctgctattcctaacagaacatttgccaagattaatccgggtgaaattattcctctcatcactaatcgtaatattctaaaacctcttattggtcagaaatattgtattgtatatactaactctctaatggatgagaacacgtatgctatggagttgcttactgggtacgcccctgtatctccgatcgttatagcgagaactcataccgcacttatatttttgatgggtaagccaacaacatccagacgtgatgtgtatagaacgtgtagagatcacgctacccgtgtacgcgcaactggtaattaaaataaaaagtaatattcatatgtagtgtcaattttaaatgatgatgatgaaatggataatatccatattgacgatgtcaataatgccggtattggcatacagctcatcgatttttagatttcattcagaggatgtggaattatgttatgggcatttgtattttgataggatctataatgtagtaaatataaaatataatccgcatattccatatagatataattttattaatcgcacgttaaccgtagatgaactagacgataatgtcttttttacacatggttattttttaaaacacaaatatggttcacttaatcctagtttgattgtctcattatcaggaaacttaaaatataatgatatacaatgctcagtaaatgtatcgtgtctcattaaaaatttggcaacgagtacatctactatattaacatctaaacataagacttattctctacatcggtccacgtgtattactataataggatacgattctattatatggtataaagatataaatgacaagtataatgacatctatgattttactgcaatatgtatgctaatagcgtctacattgatagtgaccatatacgtgtttaaaaaaataaaaatgaactcttaattatgctatgctattagaaatggataaaatcaaaattacggttgattcaaaaattggtaatgttgttaccatatcgtataacttggaaaagataactattgatgttacacctaaaaagaaaaaagaaaaggatgtattattagcgcaatcagttgctgtcgaagaggcaaaagatgtcaaggtagaagaaaaaaatattatcgatattgaagatgacgatgatatggatgtagaaagcgcataatacgatctataaaaataagtatataataaatactttttatttacggtactcttgtagtggtgataccctactcaattatttttttaaaaaaatacttattctgattcttctagccatttccgtgttcgttcgaatgccacatcgacgttaaagataggggagtagttgaaatctagttctgcattgttggtacgcacctcaaatgtagtgttggatatcttcaacgtatagttgttgagtagtgatggttttctaaatagaattctcttcatatcattcttgcacgcgtacatttttagcatccatcttggaattctagatccttgttctattcccaatggtttcatcaatagaagattaaacatatcgtacgaacacgatggagagtaatcgtagcaaaagtaagcatttcctttaatcttagatcccggatactggatatattttgcagccaacacgtgcatccatgcagcatttcctacatatacccggctatgcaccgcgtcatcatcgactgtacgatacataatgttaccgtgttgcttacattgctcgtaaaagactttcgtcaatttgtctccttctccgtaaattccagtgggtcttaggcaacaagtatacaattttgctccattcatgattacggaattattggctttcataaccagttgctcggccatacgtttactttttgcgtatacatgtcctggtgatatatcataaagggtatgctcatggccgatgaatggatcaccgtgtttattgggtcctattgcttccatgctactagtatagatcaaatacttgattcctaggtccacacaagctgccaatatagtctgtgttccataatagtttactttcatgatttcattatcggtgtattttccaaatacatccactagagcagccgtatgaataatcagatttaccccatctagcgcttctctcaccttatcaaagtcgtttatatcacattgtatatagtttataaccttaactttcgaggttattggttgtggatcttctacaatatctatgactctgatttcttgaacatcatctgcactaattaacagttttactatatacctgcctagaaatccggcaccaccagtaaccgcgtacacggccattgctgccactcataatatcagactacttattctattttactaaataatggctgtttgtataatagaccacgataatatcagaggagttatttactttgaaccagtccatggaaaagataaagttttaggatcagttattggattaaaatccggaacgtatagtttgataattcatcgttacggagatattagtcaaggatgtgattccataggcagtccagaaatatttatcggtaacatctttgtaaacagatatggtgtagcatatgtttatttagatacagatgtaaatatatttacaattattggaaaggcgttatctatttcaaaaaatgatcagagattagcgtgtggagttattggtatttcttacataaatgaaaagataatacattttcttacaattaacgagaatggcgtttgatatatcagttaatgcgtctaaaacaataaatgcattagtttacttttctactcagcaaaataaattagtcatacgtaatgaagttaatgatacacactacactgtcgaatttgatagggacaaagtagttgacacgtttatttcatataatagacataatgacaccatagagataagaggggtgcttccagaggaaactaatattggttgcgcggttaatacgccggttagtatgacttacttgtataataagtatagttttaaactgattttagcagaatatataagacacagaaatactatatccggcaatatttattcggcattgatgacactagatgatttggctattaaacagtatggagacattgatctattatttaatgagaaacttaaagtagactccgattcgggactatttgactttgtcaactttgtaaaggatatgatatgttgtgattctagaatagtagtagctctatctagtctagtatctaaacattgggaattgacaaataaaaagtataggtgtatggcattagccgaacatatatctgatagtattccaatatctgagctatctagactacgatacaatctatgtaagtatctacgcggacacactgagagcatagaggatgaatttgattattttgaagacgatgattcgtctacatgttctgccgtaaccgacagggaaacggatgtataattttttttatagcgtgaaggatatgataaaaaatataattgttgtatttatcccattccaatcaccttatatgattctgtaaaaaaattatactgtaacacaataaaggagtcttatagatgtatagaggtcagatactggtttgataaactgtttattccacataagtatgtttgactttatggttagacccgcatactttaacaaatcactgaaaattggagttaggtattgacctctcagaatcagttgccgttctggaacattaaatgtattttttatgatatactccaacgcatttatgtgggcatacaacaagtcattactaatggagtattccaagagttttagttgtctagtatttaacaagagaagagatttcaacagactgtttatgaactcgaacgccgcctcattgtcgcttatattgatgatgtcgaattctcccaatatcatcactgatgagtagctcatcttgttatcgggatccaagttttctaaagatgtcattaaaccctcgatcatgaatggatttatcatcatcgtttttatgttggacatgagcttagtccgtttgtccacatctatagacgacgatttctgaattatttcatatatccctctctttaactccaggaacttgtcaggatggtctactttaatatgttctcgtctaagagatgaaaatctttggatggttgcacgcgacttttctttaaaggatgacgttgcccaagatcctctcttaaatgaatccatcttatccttggacaagatggacagtctattttccttagatggtttaatatttttgttacccatgatctataaaggtagacctaatcgtctcggatgaccatatatttattttcagttttattatacgcataaattgtaaaaaatatgttaggtttacaaaaatgtctcgtggggcattaatcgtttttgaaggattggacaaatctggaaaaacaacacaatgtatgaacatcatggaatctataccggcaaacacgataaaatatcttaactttcctcagagatccactgtcactggaaagatgatagatgactatctaactcgtaaaaaaacctataatgatcatatagttaatctattattttgtgcaaatagatgggagtttgcatcttttatacaagaacaactagaacagggaattactttaatagttgatagatacgcattttctggagtagcgtatgccgccgctaaaggcgcgtcaatgactctcagtaagagttatgaatctggattgcctaaacccgacttagttatattcttggaatctggtagcaaagaaattaatagaaacgtcggcgaggaaatttatgaagatgttacattccaacaaaaggtattacaagaatataaaaaaatgattgaagaaggagatattcattggcaaattatttcttctgaattcgaggaagatgtaaagaaggagttgattaagaatatagttatagaggctatacacacggttactggaccagtggggcaactgtggatgtaatagtgaaattacattttttataaatagatgttagtacagtgttataaatggatgaagcatattactctggcaacttggaatcagtactcggatacgtgtccgatatgcataccgaactcgcatcaatatctcaattagttattgccaagatagaaactatagataatgatatattaaacaaggacattgtaaattttatcatgtgtagatcaaacttggataatccatttatctctttcctagatactgtatatactattatagatcaagagatctatcagaccgaattgattaattcattagacgacaatgaaattatcgattgtatagttaacaagtttatgagcttttataaggataacctagaaaatatagtagatgctatcattactctaaaatatataatgaataatccagattttaaaactacgtatgccgaagtactcggttccagaatagccgatatagatattaaacaagtgatacgtaagaatatactacaattgtctaatgatatccgcgaacgatatttgtgaaaaatattaaaaaaaaatactttttttattaaatgacgtcgcttcgcgaatttagaaaattatgctgtgatatatatcacgcatcaggatataaagaaaaatctaaattaattagagactttataacagatagggatgataaatatttgatcattaagctattgcttcccggattagacgatagaatttataacatgaacgataaacaaattataaaattatatagtataatatttaaacaatctcaggaagatatgctacaagatttaggatacggatatataggagacactattaggactttcttcaaagagaacacagaaatccgtccacgagataaaagcattttaactttagaagaagtggatagttttttaactacgttatcatccgtaactaaagaatcgcatcaaataaaattattgactgatgtagcatctgtttgtacatgtaatgatttaaaatgtgtagtcatgcttattgataaagatctaaaaattaaagcgggccctcggtacgtacttaacgctattagtcctcatgcctatgatgtgtttagaaaatctaataacttgaaagagataatagaaaatgcatctaaacaaaatctagactctatatctatttctgttatgactccaattaatcccatgttagcggaatcgtgtgattctgtcaataaggcgtttaaaaaatttccatcaggaatgtttgcggaagtcaaatacgatggtgaaagagtacaagttcataaaaataataacgagtttgccttctttagtagaaacatgaaaccagtactctctcataaagtggattatctcaaagaatacataccgaaagcatttaaaaaagctacgtctatcgtattggattctgaaattgttcttgtagacgaacataatgtaccgctaccgtttggaagtttaggaatacacaaaaagaaagaatataaaaactctaacatgtgtttgttcgtgtttgactgtttgtactttgatggattcgatatgacggacattccattgtacgaacgaagatcttttctcaaagatgttatggttgaaatacccaatagaatagtattctcagagttgacgaatattagtaacgagtctcagttaactgacgtattggatgatgcactaacgagaaaattagaaggattggtcttaaaagatattaatggagtatacgaaccgggaaagagaagatggttaaaaataaagcgagactatttgaacgagggttccatggcagattctgccgatttagtagtactaggtgcctactatggtaaaggagcaaagggtggtatcatggcagtctttctaatgggttgttacgacgatgaatccggtaaatggaagacggttaccaagtgttcaggacacgatgataatacgttaagggagttgcaagaccaattaaagatgattaaaattaacaaggatcccaaaaaaattccagagtggttagtagttaataaaatctatattcccgattttgtagtagaggatccgaaacaatctcagatatgggaaatttcaggagcagagtttacatcttccaagtcccataccgcaaatggaatatccattagatttcctagatttactaggataagagaggataaaacgtggaaagaatctactcatctaaacgatttagtaaacttgactaaatcttaatagttacatacaaactgaaaattaaaataacaccatttagttggtggtcgccatggatggtgttattgtatactgtctaaacgcgttagtaaaacatggcgaggaaataaatcatataaaaaatgatttcatgattaaaccatgttgtgaaagagtttgtgaaaaagtcaagaacgttcacattggcggacaatctaaaaacaatacagtgattgcagatttgccatatatggataatgcggtatccgatgtatgcaattcactgtataaaaagaatgtatcaagaatatccagatttgctaatttgataaagatagatgacgatgacaagactcctactggtgtatataattattttaaacctaaagatgttattcctgttatcatatctataggaaaggataaagatgtctgtgaactattaatctcatcagacatatcgtgtgcatgcgtggagttaaattcatatcacgtagccattcttcccatgaatgtttccttttttaccaaaggaaatgcctcgttgattattctcctgtttgatttctctatcgatgcagcacctctcttaagaagtgtaaccgataataatgttattatatctagacaccagcgtctacatgacgagcttccgagttccaattggttcaagttttacataagtataaagtccgactattgttctatattatatatggttgttgatggatctgtgatgcatgcgatagctgataatagaactcacgcaattattagcaaaaatatattagacaatactacaattaacgatgagtgtagatgctgttattttgaaccacagattaggattcttgatagagatgagatgctcaatggatcatcgtgtgatatgaacagacattgtattatgatgaatttacctgatgtaggcgaatttggatctagtatgttggggaaatatgaacctgacatgattaagattgctctttcggtggctggtaatttaataagaaatcgagactacattcccgggagacgaggctatagctactacgtttacggtatagcctctagataatttttttaagcacgaaataaaaaacataattttaaaccaatctatttcatactattttgtgtgatcaccatggacataaagatagatattagtatttctggtgataaatttacggtgactactaggagggaaaatgaagaaagaaaaaaatatctacctctccaaaaagaaaaaactactgatgttatcaaacctgattatcttgagtacgatgacttgttagatagagatgagatgtttactattctagaggaatattttatgtacagaggtctattaggcctcagaataaaatatggacgactctttaacgaaattaaaaaattcgacaatgatgcggaagaacaattcggtactatagaagaactcaagcagaaacttagattaaattctgaagagggagcagataactttatagattatataaaggtacaaaaacaggatatcgtcaaacttactgtatacgattgcatatctatgataggattgtgtgcatgcgtggtagatgtttggagaaatgagaaactgttttctagatggaaatattgtttacgagcgattaaactgtttattaatgatcacatgcttgataagataaaatctatactgcagaatagactagtatatgtggaaatgtcatagaaagttaatgagagcaaaaatatataaggttgtattccatatttgttattttttctgtaatagttaaaaaaatacattcgatggtctatctatcagattattatgtgttataaggtactttttctcataataaactagagtatgagtaagatagtgtttttcaaaacatataaatctaaaattgatggatgagatatacagctattaatttcgaaaatatataaatctaaaattgatggataagatatacagctattaatttcgaaaatatattttaatctgataactttaaacatggatttttgatggtggtttaacgttttaaaaaaagattttgttattgtagtatatgataatattaaaagatggatataaagaatttgctgactgcatgtactattttttacattactacattggctacggcagatatacctactccgccaccaacgggtcatgtgacaagggagaatatcttgataagaggcataatcaatgttgtaatcggtgtccacctggagaatttgccaaggttagatgtaatggtaacgataacacaaaatgtgaacgctgcccacctcatacatataccacaatccccaattattctaatggatgtcatcaatgtagaaaatgcccaaccggatcatttgataaggtaaagtgtaccggaacacagaacagtaaatgttcgtgtcttcctggttggtattgcgctactgattcttcacagactgaagattgttgaaattgtgtaccaaaaaggagatgtccatgcggatactttggtggaatagatgaacaaggaaatcctatttgtaaatcgtgctgtattggtgaatattgcaactacctacgtaattatagacttgatccattttctccatgcaaactatctaaatgtaattaattatgattttgatgataatgttaccatacattatatcgctacttggttagtgtattattcagtatgaagacctattaataattacttatcttttgacgatcttgttataattataatataaaaacttatggcatagtaactcataattgctgacgcgataaattcgtaataatctgttttgttcaaatttttataaggaatctacaggcataaaaataaaaatataatttataatatactcttacagcgcgccatcatgaatagcagcagtaaattaattgctgttattaatggatttagaaatagtggacgattttgtgatattaatatagttattaatgatgaaaggataaacgctcacagactcatcctatctggagcctccgaatatttttccattctgttttccaataattttatcgattctaatgaatacgaagttaatctaagtcatttagattatcaaagtgttaacgatttgatcgattacatttatgggatacctttgagcctaactaacgataacgtgaaatatattctttcaaccgctgattttttacaaattggatctgccattactgagtgcgaaaaatacatacttaaaaatctttgttctagaaactgtatcgatttctacatatacgctgataaatataataacaagaaaatagaatcagcgtcgtttaacacaatattacgaaatattttgagactcatcaacgatgaaaactttaaatacttaacagaggaatcaatgataaaaattttaagcgatgatatgttaaatataaaaaatgaggattttgcaccactaattctcattaaatggttagagagtactcaacaatcatgcaccgtcgagttacttagatgcctcagaatatcattgctttccccacaagttataaaatcactttatagtcatcaactggttagttcaatctacgaatgtataacattcttaaacaatatagcattcttggatgaatcatttcctagataccatagcatcgagttgatatctatcggtataagtaattcgcatgataagatttccataaactgctacaatcataaaaaaaatacatgggaaatgatatcttcacgtagatataggtgtagtttcgcagtggccgtcctggataatattatctatatgatgggtggatatgatcagtccccgtatagaagttcaaaggttatagcgtacaatacatgtacaaattcttggatatatgatataccagagctaaaatatcctcgttctaattgtgggggactggctgatgacgaatacatttattgtataggcggcatacgcgatcaggattcatcgttgacatctagtattgatagatggaagccatcaaaaccatattggcagaagtatgctaaaatgcgcgaaccaaaatgtgatatgggggttgcgatgttaaacggattaatatatgtcatgggtggaatcgttaaaggtgacacgtgtaccgacgcactagagagtttatcagaagatggatggatgaagcatcaacgtcttccaataaaaatgtccaatatgtcgacgattgttcatgatggcaagatttatatatctggaggttacaacaatagtagtgtagttaatgtaatatcgaatctagtccttagctataatccgatatatgatgaatggaccaaattatcatcattaaacattcctagaattaatcccgctctatggtcagcgcataataaattatatgtaggaggaggaatatctgatgatgttcgaactaatacatctgaaacatacgataaagaaaaagattgttggacattggataatggtcacgtgttaccacgcaattatataatgtataaatgcgaaccgattaaacataaatatccattggaaaaaacacagtacacgaatgattttctaaagtatttggaaagttttataggtagttgatagaacaaaatacataattttgtaaaaataaatcactttttatactaatatgacacgattaccaatacttttgttactaatatcattagtatacgctacaccttttcctcagacatctaaaaaaataggtgatgatgcaactctatcatgtaatcgaaataatacaaatgactacgttgttatgagtgcttggtataaggagcccaattccattattcttttagctgctaaaagcgacgtcttgtattttgataattataccaaggataaaatatcttacgactctccatacgatgatctagttacaactatcacaattaaatcattgactgctagagatgccggtacttatgtatgtgcattctttatgacatcaactacaaatgacactgataaagtagattatgaagaatactccacagagttgattgtaaatacagatagtgaatcgactatagacataatactatctggatctacacattcaccagaaactagttctgagaaaccagaggatatagataattttaattgctcgtcggtattcgaaatcgcgactccggaaccaattactgataatgtagaagatcatacagacaccgtcacatacactagtgatagcattaatacagtaagtgcatcatctggagaatccacaacagacgagactccggaaccaattactgataaagaagaagatcatacagtcacagacactgtctcatacactacagtaagtacatcatctggaattgtcactactaaatcaaccaccgatgatgcggatctttatgatacgtacaatgataatgatacagtaccaccaactactgtaggcggtagtacaacctctattagcaattataaaaccaaggactttgtagaaatatttggtattaccgcattaattatattgtcggccgtggcaatattctgtattacatattatatatataataaacgttcacgtaaatacaaaacagagaacaaagtctagatttttgacttacataaatgtctgggatagtaaaatctatcatattgagcggaccatctggttcaggaaagacagccatagccaaaagactatgggaatatatttggatttgtggtgtcccataccactagatttcctcgtcctatggaacgagaaggtgtcgattaccattacgttaacagagaggccatctggaagggaatagccgccggaaactttctagaacatactgagtttttaggaaatatttacggaacttctaaaactgctgtgaatacagcggctattaataatcgtatttgtgtgatggatctaaacatcgatggcgttagaagtcttaaaaatacgtacctaatgccttactcggtgtatataagacctacctctcttaaaatggttgagaccaagcttcgttgtagaaacactgaagcggatgatgagattcatcgtcgtgtgatgttggcaaaaactgacatggatgaggcaggtgaagccggtctattcgacactattatcattgaagatgatgtgaatttagcatatagtaagttaattcagatactacaggaccgtattagaatgtattttaacactaattagagacttaagacttaaaacttgataattaataatataactcgtttttatatgtggctatttcaacgtctaatgtattagttaaatattaaaacttaccacgtaaaacttaaaatttaaaatgatatttcattgacagatagatcacacattatgaactttcaaggacttgtgttaactgacaattgcaaaaatcaatgggtcgttggaccattaataggaaaaggtggattcggtagtatttatactactaatgacaataattatgtagtaaaaatagagcccaaagctaacggatcattatttaccgaacaggcattttatactagagtacttaaaccatccgttatcgaagaatggaaaaaatctcacaatataaagcacgtaggtcttatcacgtgcaaggcatttggtctatacaaatccattaatgtggaatatcgattcttggtaattaatagattaggtgcagatctagatgcggtgatcagagccaataataatagattaccaaaaaggtcggtgatgttgatcggaatcgaaatcttaaataccatacaatttatgcacgagcaaggatattctcacggagatattaaagcgagtaatatagtcttggatcaaatagataagaataaattatatctagtggattacggattggtttctaaattcatgtctaatggcgaacatgttccatttataagaaatccaaataaaatggataacggtactctagaatttacacctatagattcgcataaaggatacgttgtatctagacgtggagatctagaaacacttggatattgtatgattagatggttgggaggtatcttgccatggactaagatatctgaaacaaagaattgtgcattagtaagtgccacaaaacagaaatatgttaacaatactgcgactttgttaatgaccagtttgcaatatgcacctagagaattgctgcaatatattaccatggtaaactctttgacatattttgaggaacccaattacgacgagtttcggcacatattaatgcagggtgtatattattaagtgtggtgtttggtcgatgtaaaatttttgtcgataaaaattaaaaaataacttaatttattattgatctcgtgtgtacaaccgaaatcatggcgatgttttacgcacacgctctcggtgggtacgacgagaatcttcatgcctttcctggtaccaaaaattgaaaaactagcgtctttttttgctcgactgcagaccatggagacacccaagcctaggatactgccctggctcgtgagccagctcgatctcggccaactcgaaggtgtcgcttggttggacgagtcaaggacaagattcagaataccctggaagcatggcctgagacaggatgctcagatggccgattttggtatttttcaagcttgggccgaagcttctggtgcttacacccccggcaaggataaacctgatgtgtccacttggaaacggaatttccggtctgccttgaaccggaaggaagtgttgcgcctcgccgcagataactctaaagatccttacgaccctcacaaagtttatgagtttgttactcccggggcaagagattttgtgcatcttggggcttcacccgatactaatggaaaaagtagtcttccccacagtcaggagaatcttcccaaactttttgatgggcttattctcgggcccttgaaggatgaggggagttccgatttggcaatagtctctgacccaagccagcaactgccatcaccaaacgtcaacaattttctcaatccagccccccaagagaacccccttaaacagcttcttgccgaggagcaatgggagttcgaagttactgccttctatcgcgggaggcaggtattccaacaaaccttgttttgtccaggaggcttgagactcgtgggcagcactgctgatatgactctgccctggcagccagtgaccctccccgaccctgaagggttcctgactgacaaactcgtgaaggagtacgtgggacaagtactgaagggcctgggaaatggtcttgccctctggcaagctggacagtgcttgtgggctcaacgccttggacattcacacgcattttgggccctcggggaggagcttcttcctgacagtggccgcggaccagatggcgaggtacataaggataaagatggtgcagtcttcgacctcagaccatttgtcgcagaccttatcgccttcatggaaggttccggtcacagccctagatatacactttggttctgtatgggggaaatgtggccacaagatcaaccttgggtcaagcgccttgttatggtaaaggtggtccctacatgtttgaaagagctgctcgaaatggctcgggaaggaggagcctcttctttgaaaactgtagacctgcacatatctaacagccaaccaatcagcctgacctccgatcagtacaaagcttaccttcaagaccttgtcgaggacatggacttccaagccacaggcaacatttgattaattaatttttatgagctcctggtaaaagttaaacttggggagaatgatacagaaaatctttcttctactatatcggcggcaccatcgaggtaaccacctctcaagaagaccgcgtgaataatgtactcatgaaacgtttggaaactatacgccatatgtggtctgttgtatatgatcattttgatattgtgaatggtaaagaatgctgttatgtgcatacgcattcatctaatcaaaatcctataccgagtactgtaaaaacaaatttgtacatgaagactatgggatcatgcattcaaatggattccatggaagctctagagtatcttagcgaactgaaggaatcaggtggatggagtcccagaccagaaatgcaggaatttgaatatccagatggagtggaagacactgaatcaattgagagattggtagaggagttcttcaatagatcagaacttcaggctggtaaattagtcaaatttggtaattctattaattgttaaacatacatctgtttcagctaagcaactaagaacacgtatacggcagcagcttccttttatactctcatcttttaccaacacaaagggtggatatttgttcattggagttgataataatacacacaaagtatttggattcacggtgggttacgactacctcagactgatagagaatgatatagaaaagcatatcaaaagactttgtgttgtgcatttctgtgagaagaaagaggacatcaagtacacgtgtcgattcatcaaggtatataaacctggggatgaggctacctcgacatacgtgtgcgctatcaaagtggaaagatgctgttgtgctgtgtttgcagattggccagaatcatggtatatggatactaatggtatcaagaagtattctccagatgaatgggtgtcacatataaaattttaattaatgtaactatagagaacaaataataggttgtaatatcatatagacaataactaacaattaattagtaactgttatctcttttttaactaaccaactaactatatacctattaatacatcgtaattatagttcttaacatctattaatcattgattcgcttctttaattttttataaactaacattgttaattgaaaagggataacatgttacagaatataaattatatatggatttttttaaaaaggaaatacttgactggagtgtatatttatctcttcattatatagcacgcgtgtgttccaattcttccacatcccatataatacaggattataatctcgttcgaacatacgagaaagtggataaaacaatagttgattttttatctaggttgccaaatttattccatattttagaatatggggaaaatattctacatatttattctatggatgatgctaatacgaatattataattttttttctagatagagtattaaatattaataagaacgggtcatttatacacaatctcaggttatcatcatccattaatataaaagaatatgtatatcaattagttaataatgatcatccagataataggataagactaatgcttgaaaatggacgtagaacaagacattttttgtcctatatatcagatacagttaatatctatatatgtattttaataaatcatggattttatatagatgcagaagacagttacggttgtacattattacatagatgtatatatcactataagaaatcagaatcagaatcatacaatgaattaattaagatattgttaaataatggatccgatgtagataaaaaagatacgtacggaaacacaccttttatcctattatgtaaacacgatatcaacaacgtggaattgtttgagatatgtttagagaatgctaatatagactctgtagactttaatagatatacacctcttcattatgtctcatgtcgtaataaatatgattttgtaaagttattaatttctaaaggagcaaatgttaatgcgcgtaataaattcggaactactccattttattgtggaattatacacggtatctcgcttataaaactatatttggaatcagacacagagttagaaatagataatgaacatatagttcgtcatttaataatttttgatgctgttgaatctttagattatctattatccagaggagttattgatattaactatcgtactatatacaacgaaacatctatttacgacgctgtcagttataatgcgtataatacgttggtctatctattaaacagaaatggtgattttgagacgattactactagtggatgtacatgtatttcggaagcagtcgcaaacaacaacaaaataataatggaagtactattgtctaaacgaccatctttgaaaattatgatacagtctatgatagcaattactaaaaataaacaacataatgcagatttattgaaaatgtgtataaaatatactgcgtgtatgaccgattatgatactcttatagatgtacagtcgctacagcaatataaatggtatattttaaaatgtttcgatgaaatagatatcatgaagagatgttatataaaaaataaaactgtattccaattagttttttgtatcaaagacattaatactttaatgagatatggtaaacatccttctttcgtgaagtgcactagtctcgacgtatacggaagtcgtgtacgtaatatcatagcatctattagatatcgtcagagattaattagtctattatccaagaagctggatgcgggagataaatggtcgtgttttcctaacgaaataaaatataaaatattggaaaactttaacgataacgaactatccacatatctaaaaatcttataaacactattaaaatataaaatctaagtaggataaaatcacactacatcattgtttccttttagtgctcgacagtgtatactatttttaacactcataaataaaaatgaaaacgatttccgttgttacgttgttatgcgtactacctgctgttgtttattcaacatgtactgtacccactatgaataacgctaaattaacgtctaccgaaacatcgtttaatgataaacagaaagttacatttacatgtgatcagggatatcattctttggatccaaatgctgtctgcgaaacagataaatggaaatacgaaaatccatgcaagaaaatgtgcacagtttctgattatgtctctgaattatatgataagccattatacgaagtgaattccaccatgacactaagttgcaacggcgaaacaaaatattttcgttgcgaagaaaaaaatggaaatacttcttggaatgatactgttacgtgtcctaatgcggaatgtcaacctcttcaattagaacacggatcgtgtcaaccagttaaagaaaaatactcatttggggaatatatgactatcaactgtgatgttggatatgaggttattggtgcttcgtacataagttgtacagctaattcttggaatgttattccatcatgtcaacaaaaatgtgatataccgtctctatctaatggattaatttccggatctacattttctatcggtggcgttatacatcttagttgtaaaagtggttttatactaacgggatctccatcatccacatgtatcgacggtaaatggaatcccatactcccaacatgtgtacgatctaacgaaaaatttgatccagtggatgatggtcccgacgatgagacagatttgagcaaactctcgaaagacgttgtacaatatgaacaagaaatagaatcgttagaagcaacttatcatataatcatagtggcgttaacaattatgggcgtcatatttttaatctccgttatagtattagtttgttcctgtgacaaaaataatgaccaatataagttccataaattgctaccgtaaatataaatccgttaaaataattaataatttaataacaaacaagtatcaaaagattaaagacttatagctagaatcaattgagatgtcttcttcagtggatgttgatatctacgatgccgttagagcatttttactcaggcactattataacaagagatttattgtgtatggaagaagtaacgccatattacataatatatacaggctatttacaagatgcgccgttataccgttcgatgatatagtacgtactatgccaaatgaatcacgtgttaaacaatgggtgatggatacacttaatggtataatgatgaatgaacgcgatgtttctgtaagcgttggcaccggaatactattcatggaaatgtttttcgattacaataaaaatagtatcaacaatcaactaatgtatgatataattaatagcgtatctataattctagctaatgagagatatagaagcgcttttaacgacgatggtatatacatccgtagaaatatgattaacaagttgtacggatacgcatctctaactactattggcacgatcgctggaggtgtttgttattatctgttgatgcatctagttagtttgtataaataattatttcaatatactagttaaaattttaagattttaaatgtataaaaaactaataacgtttttatttgtaataggtgcattagcatcctattcgaataatgagtacactccgtttaataaactgagtgtaaaactctatatagatggagtagataatatagaaaattcatatactgatgataataatgaattggtgttaaattttaaagagtacacaatttctattattacagagtcatgcgacgtcggatttgattccatagatatagatgttataaacgactataaaattattgatatgtataccattgactcgtctactattcaacgcagaggtcacacgtgtagaatatctaccaaattatcatgccattatgataagtacccttatattcacaaatatgatggtgatgagcaacaatattctattactgcagagggaaaatgctataaaggaataaaatatgaaataagtatgatcaacgatgatactctattgagaaaacatactcttaaaattggatctacttatatatttgatcgtcatggacatagtaatacatattattcaaaatatgatttttaaaaatttaaaatatattatcacttcagtgacagtagtcaaataacaaacaacaccatgagatatattataattctcgcagttttgttcattaatagtatacacgctaaaataactagttataagtttgaatccgtcaattttgattccaaaattgaatggactggggatggtctatacaatatatcccttaaaaattatggcatcaagacgtggcaaacaatgtatacaaatgtaccagaaggaacatacgacatatccgcatttccaaagaatgatttcgtatctttctgggttaaatttgaacaaggcgattataaagtggaagagtattgtacgggactatgcgtcgaagtaaaaattggaccaccgactgtaacattgactgaatacgacgaccatatcaatttgtacatcgagcatccgtatgctactagaggtagcaaaaagattcctatttacaaacgcggtgacatgtgtgatatctacttgttgtatacggctaacttcacattcggagattctaaagaaccagtaccatatgatatcgatgactacgattgcacgtctacaggttgcagcatagactttgtcacaacagaaaaagtgtgcgtgacagcacagggagccacagaagggtttctcgaaaaaattactccatggagttcgaaagtatgtctgacacctaaaaagagtgtatatacatgcgcaattagatccaaagaagatgttcccaatttcaaggacaaaatggccagagttatcaagagaaaatttaataaacagtctcaatcttatttaactaaatttctcggtagcacatcaaatgatgttaccacttttcttagcatgcttaacttgactaaatattcataactaatttttattaatgatacaaaaacgaaataaaactgcatattatacactggttaacgcccttataggctctaaccattttcaagatgaggtccctgattatagtccttctgttcccctctatcatctactccatgtctattagacgatgtgagaagactgaagaggaaacatggggattgaaaatagggttgtgtataattgccaaagatttctatcccgaaagaactgattgcagtgttcatctcccaactgcaagtgaaggattgataactgaaggcaatggattcagggatatacgaaacaccgataaattataaaaaaagcaatgtgtccgctgtttccgttaataatactattttcgtaactggcggattattcataaataactctaatagcacgatcgtggttaacaatatggaaaaacttgacatttataaagacaaacaatggtcgattatagaaatgcctatggctagggtatatcacggcatcgactcgacatttggaatgttatattttgccggaggtctatccgttaccgaacaatatggtaatttagagaaaaacaacgagatatcttgttacaatcctagaacgaataagtggtttgatatttcatatactatttataagatatccatatcatcattgtgtaaactaaataacgtcttctatgtatttagtaaggacattggatatgtggaaaagtatgatggtgcatggaagttagtacatgatcgtctccccgctataaaggcattatcaacttctccttattgattgaaaatgaaaatataaatagtttttatgtatagcagtattaccctatagttttattgcttactactaacatggatacagatgttacaaatgtagaagatatcataaatgaaatagatagagagaaagaagaaatactaaaaaatgtagaaattgaaaataataaaaacattaacaagaatcatccaagtggatatattagagaagcactcgttattaatacaagtagtaatagtgattccattgataaagaagttatagaatgtatcagtcacgatgtaggaatatagatcatatctactaatttttataatcgatacaaaacataaaaaacaactcgttattacatagcaggcatggaatccttcaagtattgttttgataacgatggcaagaaatggattatcggaaatactttatattctggtaattcaatactatataaggtcagaaaaaatttcactagttcgttctacaattacgtaatgaaaatagatcacaaatcacacaagccattgttgtctgaaatacgattctatatatctgtattggatcctttgactatcgacaactggacacgggaacgtggtataaagtatttggctattccagatctgtatggaattggagaaaccgatgattatatgttcttcgttataaagaattcgggaagagtattcgccccaaaggatactgaatcagtcttcgaagcatgcgtcactatgataaacacgttagagtttatacactctcgaggatttacccatggaaaaatagaaccgaggaatatactgattagaaataaacgtctttcactaattgactattctagaactaacaaactatacaagagtggaaactcacatatagattacaacgaggacatgataacttcaggaaatatcaattatatgtgtgtagacaatcatcttggagcaacagtttcaaaacgaggagatttagaaatgttgggatattgcatgatagaatggttcggtggcaaacttccatggaaaaacgaaagtagtataaaagtaataaaacaaaaaaaagaatataaaaaatttatagctactttctttgaggactgttttcctgaaggaaatgaacctctggaattagttagatatatagaattagtatacacgttagattattctcaaactcctaattatgacagactacgtaaactgtttatacaagattgaaattatattctttttttatagagtgtggtagtgttacggatatctaatattaatattagactatctctatcgcgctacacgaccaatatcgattactatggatatcttcagggaaatcgcatcttctatgaaaggagagaatgtattcatttctccagcgtcaatctcgtcagtattgacaatactgtattatggagctaatggatccactgctgaacagctatcaaaatatgtagaaacggaggagaacacggataaggttagcgctcagaatatctcattcaaatccatgaataaagtatatgggcgatattctgccgtgtttaaagattcctttttgagaaaaattggcgataagtttcaaactgttgacttcactgattgtcgcactatagatgcaatcaacaagtgtgtagatatctttactgaggggaaaatcaatccactattggatgaaccattgtctcctgatacctgtctcctagcaattagtgccgtatactttaaagcaaaatggttgatgccattcgaaaaggaatttaccagtgattatcccttttacgtatctccgacggaaatggtagatgtaagtatgatgtctatgtacggcaaggcatttaatcacgcatctgtaaaggaatcattcggcaacttttcaatcatagaactgccatatgttggagatactagtatgatggtcattcttccagacaagattgatggattagaatccatagaacaaaatctaacagatacaaattttaagaaatggtgtaactctctggaagctacgtttatcgatgttcacattcccaagtttaaggtaacaggttcgtataatcttgtggatactctagtaaagtcaggactgacagaggtgttcggttcaactggagattatagcaatatgtgtaattcagatgtgagtgtcgacgctatgattcacaaaacgtatatagatgtcaatgaagagtatacagaagcagctgcagcaacttgtgcactggtgtcagactgtgcatcaacaattacaaatgagttctgtgtagatcatccgttcatctatgtgattaggcatgttgatggaaaaattcttttcgttggtagatattgctctccgacaactaattgttaaccattttttttaaaaaaatagaaaaaacatgtggtattagtgcaggtcgttgttcttccaattgcaattggtaagatgacggccaactttagtacccacgtcttttcaccacagcactgtggatgtgacagactgaccagtattgatgacgtcagacaatgtttgactgaatatatttattggtcgtcctatgcataccgcaacaggcaatgcgctggacagttgtattccacactcctctcttttagagatgatgcggaatcagtgttcatcgacattcgcgagctggtaaaaaatatgccgtgggatgatgtcaaagattgtacagaaatcatccgttgttatataccggatgagcaaaaaaccatcagagagatttcggccatcatcggactttgtgcatatgctgctacttactggggaggtgaagaccatcccactagtaacagtctgaacgcattgtttgtgatgcttgagatgctcaattacgtggattataacatcatattccggcgtatgaattgatgagttgtacatcttgacattttctttcttctcttctccctttcttctcttctcccttcctccctcttctccctttcccagaaacaaacttttttacccactataaaataaaatgagtatactacctattatatttcttcctatatttttttattcttcattcgttcagacttttaacgcgcctgaatgtatcgacaaagggcaatattttgcatcattcatggagttagaaaacgagccagtaatcttaccatgtcctcaaataaatacgctatcatccggatataatatattagatattttatgggaaaaacgaggagcggataatgatagaattataccgatagataatggtagcaatatgctaattctgaacccgacacaatcagactctggtatttatatatgcattaccacgaacgaaacctactgtgacatgatgtcgttaaatttgacaatcgtgtctgtctcagaatcaaatatagatcttatctcgtatccacaaatagtaaatgagagatctactggcgaaatggtatgtcccaatattaatgcatttattgctagtaacgtaaacgcagatattatatggagcggacatcgacgccttagaaataagagacttaaacaacggacacctggaattattaccatagaagatgttagaaaaaatgatgctggttattatacatgtgttttagaatatatatacagaggtaaaacatataacgtaaccagaattgtaaaattagaggtacgggataaaataataccttctactatgcaattaccagatggcattgtaacttcaataggtagtaatttgactattgcgtgtagagtatcgttgagacctcccacaacggatgcagacgtcttttggataagtaatggtatgtattacgaagaagatgatggggacggagacggtagaataagtgtagcaaataaaatctatatgaccgataagagacgtgttattacatcccggttaaacattaatcctgtcaaggaagaagatgctacaacgtttacgtgtatggcgtttactattcctagcatcagcaaaacagttactgttagtataacgtgaatgtatgttgttacatttccatgtcaattgagtttataagaatttttatacattatcttccaacaaacaattgacgaacgtattgctatgattaactcccacgatactatgcatattattaatcattaacttgcagactatacctagtgctattttgacatactcatgttcttgtgtaattgcggtatctatattattaaagtacgtaaatctagctatagttttattatttaattttagataatataccgtctccttatttttaaaaattgccacatcctttattaaatcatgaatgggaatttctatgtcatcgttagtatattgtgaacaacaagagcagatatctataggaaagggtggaatgcgatacattgatctatgtagttttaaaacacacgcgaactttgaagaatttatataaatcattccatcgatacatccttctatgttgacatgtatatatccaggaattcttttattaatgtcaggaaatgtataaactaaaacattgcccgaaagcggtgcctctatctgcgttatatccgttcttaacttacaaaatgtaaccaatacctttgcatgacttgttttgttcggcaacgttagtttaaacttgacgaatggattaattacaatagcatgatccgcgcatctattaagtttttttactttaacgcccttgtatgtttttacagagactttatctaaatttctagtacttgtatgtgttataaatataacgggatatagaactgaatcacctaccttagatacccaattacattttatcagatccagataataaacaaattttgtcgccctaactaattctatattgttatatattttacaattggttatgatatcatgtaataacttggagtctaacgcgcatcgtcgtacgtttatacaattgtgatttagtgtagtatatctacacatgtatttttccgcactatagtattctggactagtgataaaactatcgttatatctgtcttcaatgaactcatcgagatattgctctctgtcatattcatacacctgcataaactttctagacatcttacaatccgtgttattttaggatcatatttacatatttacgggtatatcaaagatgttagattagttaatgggaatcgtctataataatgaatattaaacaattatatgaggacttttaccacaaagcatcataaaaatgagtcgtcgtctgatttatgttttaaatatcaaccgcaaatcaactcataaaatacaagagaatgaaatatatacatattttagtcattgcaatatagaccatacttctacagaacttgattttgtagttaaaaactatgatctaaacagacgacaacatgtaactgggtatactgcactacactgctatttgtataataattactttacaaacgatgtactgaagatattattaaatcatgacgtaaatgtaacgatgaaaaccagtagcggacgtatgcctgtttatatattgcttactagatgttgcaatatttcacatgatgtagtgatagatatgatagacaaagataaaaaccacttattacatagagactattccaacctattactagagtatataaaatctcgttacatgttattaaaggaagaggatatcgatgagaacatagtatccactttattagataagggaatcgatcctaactttaaacaagacggatatacagcgttacattattattatttgtgtctcgcacacgtttataaaccaggtgagtgtagaaaaccgataacgataaaaaaggccaagcgaattatttctttgtttatacaacatggagctaatctaaacgcgttagataattgtggtaatacaccattccatttgtatcttagtattgaaatgtgtaataatattcatatgactaaaatgctgttgacttttaatccgaatttcaaaatatgtaataatcatggattaacgcctatactatgttatataacttccgactacatacaacacgatattcttgttatgttaatacatcactatgaaacaaatgttggagaaatgccgatagatgagcgtcgtatgatcgtattcgagtttatcaaaacatattctacacgtccggcagattcgataacttatttgatgaataggtttaaaaatataaatatttatacccgctatgaaggaaagacattattacacgtagcatgtgaatataataatacacacgtaatagattatcttatacgtatcaacggagatataaatgcgttaaccgacaataacaaacacgctacacaactcattatagataacaaagaaaattccccgtataccatcgattgtttactgtatatacttagatatattgtagataagaatgtgataagatcgttggtggatcaacttccatctctacctatcttcgatataaaatcatttgagaaattcatatcctactgtatacttttagatgacacattttacgataggcacgttaagaatcgcgattctaaaacgtatcgatacgcattttcaaaatacatgtcgtttgataaatacgatggtataataactaaatgtcacgacgaaacaatgttactcaaactgtccactgttctagacactacactatatgcagttttaagatgccataattcgaaaaagttaagaagatacctcaacgagttaaaaaaatataataacgataagtcctttaaaatatattctaatattatgaatgagagataccttaatgtatattataaagatatgtacgtgtcaaaggtatatgataaactatttcctgttttcacagataaaaattgtctactaacattactaccttcagaaattatatacgaaatattatacatgctgacaattaacgatctttataatatatcgtatccacctaccaaagtatagttgtatttttctcatgcgatgtgtgtaaaaaaactgatattatataaatattttagtgccgtataataaagatgacgatgaaaatgatggtacatatatatttcgtatcattattgttattgctattccacagttacgccatagacatcgaaaatgaaatcacagaattcttcaataaaatgagagatactctaccagctaaagactctaaatggttgaatccagcatgtatgttcggaggcacaatgaatgatatagccgctctaggagagccattcagcgcaaagtgtcctcctattgaagacagtcttttatcgcacagatataaagactatgtggttaaatgggagaggctagaaaagaatagacggcgacaggtttctaataaacgtgttaaacatggtgatttatggatagccaactatacatctaaattcagtaaccgtaggtatttgtgtaccgtaactacaaagaatggtgactgtgttcagggtatagttagatctcatattaaaaaacctccttcatgcattccaaaaacatatgaactaggtactcatgataagtatggcatagacttatactgtggaattctttacgcaaaacattataataatataacttggtataaagataataaggaaattaatatcgacgacattaagtattcacaaacgggaaagaaattaattattcataatccagagttagaagatagtggaagatacaactgttacgttcattacgacgacgttagaatcaagaatgatatcgtagtatcaagatgtaaaatacttacggttataccgtcgcaagaccacaggtttaaactaatactagatccaaaaatcaacgtaacgataggagaacctgccaatataacatgcactgctgtgtcaacgtcattattgattgacgatgtactgattgaatgggaaaatccatccggatggcttataggattcgattttgatgtatactctgttttaactagtagaggcggtattaccgaggcgaccttgtactttgaaaatgttactgaagaatatataggtaatacatataaatgtcgtggacacaactattattttgaaaaaacccttacaactacagtagtattggagtaaatacacaatgcatttttatatacattactgaataattattattattatttatatcgtatttgtgctataacgcgactatctaggtatttgtatctcactgatagagaacatataaatatagactctattaaacagttgtgtaaaatatcaaatcctaatagatgtggatgtacggctttacatgagtacttttataattatagatcagtcaacggaaaatacaagtatagatacaacggttactatcaatattatttatctagcgattatgaaaattataatgaatattattatgatgattatgatagaactggtatgaacagtgagagtgataatatatcaatcaaaacagaatatgaattctatgatgaaacacaagatcaaagtacacaactagtaggttacgacattaaactcaaaaccaatgaggatgattttatggctatgatagatcagtgggtgtccatgattatatagatgaatcaattaataaagtagtatatggaagagagtctcacgtaagatggcgggatatatggcaagaacataatgatggcgtatacagtataggaaaggagtgcatagataatatatacgaagacaaccataccgtagacgaattctacaagatagacagcgtatcagatgtagatgacgcggaacacatatctccgataactaatgatgtatctacacaaacatgggaaaagaaatcagagttagatagatacatggaaatgtatcctcgtcatagatatagtaagcattctgtctttaagggattttctgacaaagttagaaaaaatgatttagacatgaatgtggtaaaagaattactttctaacggtgcatctctaacaattaaggatagcagtaataaggatccaataaccgtttattttcgaagaacgataatgaatttagaaatgattgatattattaacaaacatacaactattgatgaacgaaagtatatagtacactcctatctaaaaaattataaaaatttcgattatccatttttcaggaagttagttttgactaataaacattgtctcaacaattattataatataagcgacagcaaatatggaacaccgctacatatattggcgtctaataaaaaattaataactcctaattacatgaagttattagtgtataacggaaatgatataaacgcacgaggtgaagatacacaaatgcgaactccattacacaaatatttgtgtaaatttgtatatcataatattgaatatggtatccgatactataatgaaaagattatagacgcatttatagagttaggagccgatctaactattccaaataacgatggaatgataccagtagtttactgtatacactcaaatgcagaatatggttataacaatattactaacataaagataatacgtaaactacttaatcttagtagacgtgcgtcacataatctatttagagatcgagtcatgcacgattatataagtaatacatatattgatcttgagtgtttagatattattagatcgttggatggattcgatatcaatggttactttgaaggacgtacaccacttcattgcgctatacaacataacttcactcagattgctaagtacttattagatcgaggagctgatatagtcgtacccaacacattgattatacatcagtacatacagtaaatagcatagatatggaggaggatacaaatatttcaaataaagttataaggtacaacactgtcaataatatatggaagacattacctaacttctggactggaactataaatccaggcgtggtctcgcataaagatgatatatatgttgtatgcgacatcaaagatgaaaaaaatgttaagacttgtatatttagatataacacgaatacgtataacggatgggaattggttacgacgacagaaagcagattatcagctctgcatactattcttcatgacaataccataatgatgttacattgttatgaatcgtatatgttacaagatacatttaatgtgtacactcgcgaatggaatcatatgtgtcatcaacattcgaatagttatatcatgtacaatatactacccatctactaaatataatagaataaaataaatgagtatgatcattttagataacgattgattttatcattaccgcttcattcttatattctttgcttacggaacctatatttagaaacatctactaacgattttttatgcttgcattattaatggtatgtaatatgattgattgtgtacgcaataccaatttgttaagtatgaatacggggtacaaacataaactgaaatttaacattatttatttatgatatatatcgttatcgttattgtttggtctataccatggatatctttaaagaactaatcttaaaacaccctgatgaaaatgttttgatttctccagtttctattttatctactttatctattctaaatcatggagcagctggttctacagctgaacaactatcaaaatatatagagaatatgaatgagaatacacccgatgataagaaggatgacaataatgacatggacgtagatattccgtattgtgcgacactagctaccgcaaataaaatatacggtagcgatagtatcgagttccacgcctccttcctacaaaaaataaaagacgattttcaaactgtaaactttaataatgctaaccaaacaaaggaactaatcaacgaatgggttaagacgatgacaaatggtaaaattaattccttattgactagtccgctatccattaatactcgtatgacagttgttagcgccgtccattttaaagcaatgtggaaatatccattttctaaacatcttacatatacagacaagttttatatttctaagaatatagttaccagtgttgatatgatggtgggtaccgagaataacttgcaatatgtacatattaatgaattattcggaggattctctattatcgatattccatacgagggaaactctagtatggtaattatactaccggacgacatagaaggtatatataacatagaaaaaaatataacagatgaaaaatttaaaaaatggtgtggtatgttatctactaaaagtatagacttgtatatgccaaagtttaaagtggaaatgacagaaccgtataatctggtaccgattttagaaaatttaggacttactaatatattcggatattatgcagattttagcaagatgtgtaatgaaactatcactgtagaaaaatttctacatacgacgtttatagatgttaatgaggagtatacagaagcatcggccgttacaggagtatttatgactaacttttcgatggtatatcgtacgaaggtctacataaaccatccattcatgtacatgattaaagacaacacaggacgtatactttttatagggaaatactgctatccgcaataaatataaacaaatagacttttatcacgtttatctatgtctaaatattacaaatagtaatagtataaactaaagctgataatacttaaaaaaataataatatcatttacaattaatagtataaactaaaaattaaacaaatcgttattataagtaatatcaaaatgatgatatacggattaatagcgtgtcttatattcgtgacttcatccatcgctagtccactttatattcccgttattccacccattacggaagataaatcgttcaatagtgtagaggtattagtttccttgtttagagatgaccaaaaagactatacggtaacttctcagttcaataactacactatcgataccaaagactggactatcggcgtactatccacacctgatggtttggatataccattgactaatataacttattggtcacggtttactataggtcgtgcattgttcaaatcagagtctgaggatattttccaaaagaaaatgagtattctaggtgtttctatagaatgtaagaagtcgtcgacattacttacttttttgaccgtgcgtaaaatgactcgagtatttaataaatttccagatatggcttattatcgaggagactgtttaaaagccgtttatgtaacaatgacttataaaaatactaaaactggagagactgattacacgtacctctctaatggggggttgcctgcatactatcgtaatggggtcgatggttgattattgattagtatattccttattcacacaaaaagaacatttttataaacatgaaaccactgtctaaatgtaattatgatcttgatttatagatgaagatcagcctttagaggattttaaccagtatgtttaatatgaaaaaaataaacataacatattttgagattaagcgctattgtgcttaattattttgctctataaactgaatatatagccacaattattgacgggcttgtttatgaccggcaatcatgaatttacagaaattatctctggctatatatcttactgcgacatgttcgtggtgttatgaaacatgcataagaaaaactgcgttgtatcatgacattcaattggagcatgtagaagacaataaagatagtgtagcgtcgctaccgtacaagtagtcaatcaaagagaacgtagtagattgttggctacatttaattggacagatatagctgagggtgttagaaatgagttcattaaaatatgtgatatcaacggaacatatttatataattatactattgctgttagtataattattgattccacggaagaactaccaacagttactccaattacaacaacatatgaaccttctacatataattatactatcgatgatagcactgttattactactgaagaactacaagtgactcctcatatggatctccatcgatgatacatgtattaaaatactttccgaataagtcttttaaatattgtattaattatgaaaaactatgctatgcgagtatgatgcaaagatgtttaatgatacgatactagattttatctctagcgagagatgtcgttagaatcatttatcataactacgtttaataataattcatcaacgaatatcgataacatgtgtcatttatacgttaaagtctgtccgtcttctctattgtttagactgtttgtagaatgctgtgatataaacaaactagtagaaggtacgactccgttacactgttatctaatgaatgaaggatttgaatcatctgttttaaaaaacctattaaaggagtatgtcatgaatacgtttaatgttcatgacatccattacacaaatatttaactcatgatgaagttgagaatgatatgctttctgatagtatagatagctttagctaatataaaaatatattaatccactatatattctagacttgatttaaaaccgataaactactactacgtactgtataagttgttaaaaaaaggagcagaccctaattatgtagatgatagaggtaatacttttcttcattacttctgcatctatatgtccacttatgagaaaacgtcatttaataagatgcatcgtgaaaagaaatttattaaagagttggtaaaatatgaaaccgaaagtaaataatataggaaatacacctctacataactacgtatctcaatatgatatcactctcattcctcatccacaacccattaaaaaaatggaaattaaagccctctattagcataaacggctacaggtctacctttacaatggcctctccttgtgcccagttcagaccctgtcattgccacgctactaaggactccctgaataccgtggccgacgtcagacattgtctgactgaatacatcctgtgggtttctcatagatggacccatagagaaagcgcagggtctctctacaggcttctcatctctttcagaactgatgcaacggagctctttggtggtgagttgaaggattcacttccgtgggacaatatcgacaattgcgtggagatcattaaatgtttcatcagaaatgactccatgaaaaccgccgaagaacttcgtgcaatcattggactttgtactcaatcagctatcgtctctggaagagtcttcaacgataagtatatcgacatactacttatgctgcgaaagattctgaacgagaacgactatctcaccctcttggatcatatccgcactgctaaatactaaatctccttcatgctctctcactacactttttatcatcttatgaggaatgattgccttcatcatttttcgtgaaataggaataattagcaccagaatagctatggattgcacatgtattctatgtcgtctactggatgaagatgtgacgtacaaaaaaataaaactagaaattgaaacgtgtcacaacttatcaaaacatatagatagacgaggaaacaatgcgctacattgttacgtcttcaataaatgcgatacagacattaagattgttcgactgttactctctcgcggagtcgagagactttgtagaaacaacgaaggattaactccgctaggagcatacagtaagcatagatacgtaaaatctcaaattgtgcatctactgatatccagctattcgaattcctctaacgaactcaagtcgaatataaatgatttcgatctgtattcgtatatgtcttcggataatatcgacttacgtctgctaaaatacctaattgtggataaacggatacgtccgtccaagaatacgaattatgcaatcaatggtctcggattggtggatatatacgtaacgacgcctaatccgagaccagaagtattgctatggcttcttaaatcagaatgttacagcaccggttacgtatttcgtacctgtatgtacgacagtgatatgtgtaagaactctcttcattactatatatcgtctcatagagaatctcaatctctatccaaggatgtaattaaatgtttgatcaataacaatgtttccatccatggcagagacgaaggaggatctttacccatccaatactactggtcttgctcaaccatagatatagagattgttaaattattaataaaggatgtggacacgtgtagagtatacgacgtcagccctatattagaggcggattatctaaacaagcgatttagagtaaccccatataatgtagacatggaaatcgttaatcttcttattgagagacgtcatactcttgtcgacgtaatgcgtagtattacttcttacgattccagagactataaccactacatcatcgataacattctaaagagatttagacaacaggatgaatccatcgtacaagccatgttgataaactacttacattacggcgatatggtcgttcgatgcatgttagataacggacaacaactatcctctgcacgactactttgttaataataatctcgtcgatgtaaacgtcgtaaggtttatcgtggaaaataatggacacatggctgtaaatcacgtatcgaacaatggccgtctatgtatgtacggtctgatattatcgagatttaataattgcgggtatcactgttatgaaaccatactaatagatgtatttgatatactaagcaagtacatggataatatagatatgatcgataatgagaataaaactctactatattacgcggtcgatgtcaataatatacaatttgcaaagcggttattggaatatggagcgagtgttacaacatcacgctcgataatcaatacggccatccagaaaagtagttacagaagagaaaacaaaacgaggatagttgatttattacttagctaccatcccactctagagactatgattgacgcatttaatagagatatacgctatctatatcctgaaccattattcgcctgtatcagatacgccttaatcctagatgatgattttccttctaaagtaagtatgatatctccggtcgtcataaggaactaaagcgctatagagtagacattaatagaatgaagaatgcctacatatcaggcgtctccatgtttgatatattatttaaacgaagcaaacgccacagattgagatacgcaaagaatccgacatcaaatggtacaaaaaagaactaacgtccatcattacagaaactgtaaagaacaatgagaggatcgactccatagtggacaacattaatacagacgataacttgatttcgaaattacccatggagatactttattactccattaaataatttatcatggagcgataatgtcctgtttcatttgtttccatgacatattacaaaatcgattccgtccaagatgataaaaacatttaccggcatcataaacacggagtttattttatatgtctcgcataaacattactaaaaaaatatattgttcggttttctttcacatctttaattatgaaaaagtaaatcattatgagatggacgagattgtacgcatcgttcgcgacagtatgtggtacatacctaacgtatttatggacgacggtaagaatgaaggtcacgtttctgtcaacaatgtttgtcatatgtattttacgttctttgatgtggatacatcgtctcatctgtttaagctagttattaaacactgcgatctgaataaacgaggtaactctccattacattgctatacgatgaatacacgatttaatccatctgtattaaagatattgttacaccacggcatgcgtaactttgatagcaaggatgaaaaaggacatattcctctacaccactatctgattcattcactatcaatcgataacaagatctttgatatactaacggacaccattgatgactttagtaaatcatccgatctattgctgtgttatcttagatataaattcaatgggagcttaaactattacgttctgtacaaaggatccgaccctaattgcgtcgacgaggatggactcacttctcttcattactactgtaaacacatatccacgttctacaaaagcaattattacaagttaagtcacactaagatgcgagccgagaagcgattcatctacgcgataatagattatggagcaaacattaacgcggttacacacttaccttcaacagtataccaaacatagtcctcgtgtggtgtatgctcttttatctcgaggagccgatacgaggatacgtaataatcttgattgtacacccatcatggaacgattgtgcaacaggtcatattctcataatgttactcaattggcacgaacaaaaggaagaaggacaacatctactttatctattcataaaacataatcaaggatacactctcaatatactacggtatctactagataggttcgacattcagaaagacgaatactataataccgcctttcaaaattgtaacaacaatgttgcctcatacatcggatacgacatcaaccttccgactaaagacggtattcgacttggtgtttgaaaacagaaacatcatatacaaggcggatgttgtgaatgacatcatccaccacagactgaaagtatctctacctatgattaaatcgttgttctacaagatgtcagaattctctccctacgacgattactacgtaaaaaagatactagcctactgcctattaagggacgagtcattcgcggaactacatagtaaattctgtttaaacgaggactataaaagtgtatttatgaaaaatatatcattcgataagatagattccatcatcgtgacataagtcgccttaaagagattcgaatctccgacaccgacctgtatacggtatcacagctatcttaaagccatacattcggacagacacatttcatttcccatgtacgacgatctcatagaacagtgccatctatcgatggagcataaaagtaaactcgtcgacaaagcactcaataaattagagtctaccatcggtcaatctagactatcgtatttgcctccggaaattatgcgcaatatcatctaaacagtatgttgtacggaaagaaccattacaaatattatccatgatagaaagaaaatatctatatgattggagaagtaggaaacaggaacaagacgacgattactacattattaaatcatgaagtccgtattatactcgtatatattgtttctctcatgtataataataaacggaagagatatagcaccgcatgcaccatccgatggaaagtgtaaagacaacgaatacaaacgccataatttgtgtccgggaacatacgcttccagattatgcgatagcaagactaacacacgatgtacaccctgtggttcgggtaccttcacatctcgcaataatcatttacccgcttgtctaagttgtaacggaagacgcgatcgtgtaacacgactcacaatagaatctgtgaatgctctcccggatattattgtcttctcaaaggatcatccggatgcaaggcatgtgtttcccaaacaaaatgtggaataggatacggagtatccggagacgtcatctgttctccgtgtggtctcggaacatattctcacaccgtctcttccgcagataaatgcgaacccgtacccagtaatacctttaactatatcgatgtggaaattaatctgtatcccgtcaacgacacgtcgtgtactcggacgaccactaccggtctcagtgaatccatctcaacgtcggaactaactattactatgaatcataaagactgtaatcccgtatttcgtgaggaatacttctctgtccttaataaggtagcaacttcaggtttctttacaggagaaaggtgtgcactctgaatttcgagattaaatgcaataacaaagattcttcctccaaacagttaacgaaagcaaagaatgatgacggtatcatgccgcattcggagacagtaactctagtgggcgactgtatatctagcgtcgacatctatatactatatagtaataccaatactcaagactacgaaactgatacaatctcttatcatgtgggtaatgttctcgatgtcgatagccatatgcccggtagttgcgatatacataaactgatcactaattccaaacccacccgctttttatagtaagtttttcacccataaataataaatacaataattaatttctcgtaaaagtagaaaatatattctaatttattgcatggtaaggaagtagaatcataaagaacagtactcaatcaatagcaattatgaaacaatatatcgtcctggcatgcatgtgcctgccagtcttcagcaatcatcctcatcctcatcctcgtgtacggaagaagaaaacaaacatcatatgggaatcgatgttattatcaaagtcacaaagcaagaccaaacaccgaccaatgataagatttgccaatccgtaacggaaattacagagtccgagtcagatccaaatcccgaggtggaatcagaagatgattccacatcagtcgaggatgtagatcctcctaccacttattactccatcatcggtggaggtctgagaatgaactttggattcaccaaatgtcctcagattaaatccatctcagaatccgctgatggaaacacagtgaatgctagattgtccagcgtgtccccaggacaaggtaaggactctcccgcgatcactcatgaagaagctcttgctatgatcaaagactgtgaggtgtctatcgacatcagatgtagcgaagaagagaaagacagcgacatcaagacccatccagtactcgggtctaacatctctcataagaaagtgagttacgaagatatcatcggttcaacgatcgtcgatacaaaatgtgtcaagaatctagagtttagcgttcgtatcggagacatgtgcaaggaatcatctgaacttgaggtcaaggatggattcaagtatgtcgacggatcggcatctgaaggtgcaaccgatgatacttcactcatcgattcaacaaaactcaaagcgtgtgtctgaatcgataactctattcatctgaaattggatgagtagggttaatcgaacgattcaggcacaccacgaattaaaaaagtgtaccggacactatattccggtttgcaaaacaaaaatgttcttaactacattcacaaaaagttacctctcgcgacttcttctttttctgtctcaatagtgtgatacgattatgacactattcctattcctattcctatttcctttcagggtatcacaaaaatattaaacctctttctgatggtctcataaaaaaagttttacaaaaatatttttattctctttctctctttgatggtctcataaaaaaagttttacaaaaatatttttattctctttctctctttgat

SEQ ID NO: 84 - DNA, 198421 bp, Vaccinia virus; identical to SEQ ID NO: 83
  source 1..198421: mol_type = genomic DNA
  misc_feature 1..198421: note = VIR105

SEQ ID NO: 85 - DNA, 197589 bp, Vaccinia virus
  source 1..197589: mol_type = genomic DNA
  misc_feature 1..197589: note = VIR106
atcaaagagagaaagagaataaaaatatttttgtaaaactttttttatgagaccatcaaagagagaaagagaataaaaatatttttgtaaaactttttttatgagaccatcagaaagaggtttaatatttttgtgataccctgaaaggaaataggaataggaataggaatagtgtcataatcgtatcacactattgagacagaaaaagaagaagtcgcgagaggtaactttttgtgaatgtagttaagaacatttttgttttgcaaaccggaatatagtgtccggtacacttttttaattcgtggtgtgcctgaatcgttcgattaaccctactcatccaatttcagatgaatagagttatcgattcagacacacgctttgagttttgttgaatcgatgagtgaagtatcatcggttgcaccttcagatgccgatccgtcgacatacttgaatccatccttgacctcaagttcagatgattccttgcacatgtctccgatacgaacgctaaactctagattcttgacacattttgtatcgacgatcgttgaaccgatgatatcttcgtaactcactttcttatgagagatgttagacccgagtactggatgggtcttgatgtcgctgtctttctcttcttcgctacatctgatgtcgatagacacctcacagtctttgatcatagcaagagcttcttcatgagtgatcgcgggagagtccttaccttgtcctggggacacgctggacaatctagcattcactgtgtttccatcagcggattctgagatggatttaatctgaggacatttggtgaatccaaagttcattctcagacctccaccgatgatggagtaataagtggtaggaggatctacatcctcgactgatgtggaatcatcttctgattccacctcgggatttggatctgactcggactctgtaatttccgttacggattggcaaatcttatcattggtcggtgtttggtcttgctttgtgactttgataataacatcgattcccatatgatgtttgttttcttcttccgtacacgaggatgaggatgaggatgattgctgaagactggcaggcacatgcatgccaggacgatatattgtttcataattgctattgattgagtactgttctttatgattctacttccttaccatgcaataaattagaatatattttctacttttacgagaaattaattattgtatttattatttatgggtgaaaaacttactataaaaagcgggtgggtttggaattagtgatcagtttatgtatatcgcaactaccgggcatatggctatcgacatcgagaacattacccacatgataagagattgtatcagtttcgtagtcttgagtattggtattactatatagtatatagatgtcgacgctagatatacagtcgcccactagagttactgtctccgaatgcggcatgataccgtcatcattctttgctttcgttaactgtttggaggaagaatctttgttattgcatttaatctcgaaattcagagtgcacacctttctcctgtaaagaaacctgaagttgctaccttattaaggacagagaagtattcctcacgaaatacgggattacagtctttatgattcatagtaatagttagttccgacgttgagatggattcactgagaccggtagtggtcgtccgagtacacgacgtgtcgttgacgggatacagattaatttccacatcgatatagttaaaggtattactgggtacgggttcgcatttatctgcggaagagacggtgtgagaatatgttccgagaccacacggagaacagatgacgtctccggatactccgtatcctattccacattttgtttgggaaacacatgccttgcatccggatgatcctttgagaagacaataatatccgggagagcattcacagattctattgtgagtcgtgttacacgatcgcgtcttccgttacaacttagacaagcgggtaaatgattattgcgagatgtgaaggtacccgaaccacagggtgtacatcgtgtgttagtcttgctatcgcataatctggaagcgtatgttcccggacacaaattatggcgtttgtattcgttgtctttacactttccatcggatggtgcatgcggtgctatatctcttccgtttattattatacatgagagaaacaatatatacgagtataatacggacttcatgatttaataatgtagtaatcgtcgtcttgttcctgtttcctacttctccaatcatatagatattttctttctatcatggataatatttgtaatggttctttccgtacaacatactgtttagatgatattgcgcataatttccggaggcaaatacgatagtctagattgaccgatggtagactctaatttattgagtgctttgtcgacgagtttacttttatgctccatcgatagatggcactgttctatgagatcgtcgtacatgggaaatgaaatgtgtctgtccgaatgtatggctttaagatagctgtgataccgtatacaggtcggtgtcggagattcgaatctctttaaggcgacttatgtcacgatgatggaatctatcttatcgaatgatatatttttcataaatacacttttatagtcctcgtttaaacagaatttactatgtagttccgcgaatgactcgtcccttaataggcagtaggctagtatcttttttacgtagtaatcgtcgtagggagagaattctgacatcttgtagaacaacgatttaatcataggtagagatactttcagtctgtggtggatgatgtcattcacaacatccgccttgtatatgatgtttctgttttcaaacaccaagtcgaataccgtctttagtcggaaggttgatgtcgtatccgatgtatgaggcaacattgttgttacaattttgaaaggcggtattatagtattcgtctttctgaatgtcgaacctatctagtagataccgtagtatattgagagtgtatccttgattatgttttatgaatagataaagtagatgttgtccttcttccttttgttcgtgccaattgagtaacattatgagaatatgacctgttgcacaatcgttccatgatgggtgtacaatcaagattattacgtatcctcgtatcggctcctcgagataaaagagcatacaccacacgaggactatgtttggtatactgttgaaggtaagtgtgtaaccgcgttaatgtttgctccataatctattatcgcgtagatgaatcgcttctcggctcgcatcttagtgtgacttaacttgtaataattgcttttgtagaacgtggatatgtgtttacagtagtaatgaagagaagtgagtccatcctcgtcgacgcaattagggtcggatcctttgtacagaacgtaatagtttaagctcccattgaatttatatctaagataacacagcaatagatcggatgatttactaaagtcatcaatggtgtccgttagtatatcaaagatcttgttatcgattgatagtgaatgaatcagatagtggtgtagaggaatatgtcctttttcatccttgctatcaaagttacgcatgccgtggtgtaacaatatctttaatacagatggattaaatcgtgtattcatcgtatagcaatgtaatggagagttacctcgtttattcagatcgcagtgtttaataactagcttaaacagatgagacgatgtatccacatcaaagaacgtaaaatacatatgacaaacattgttgacagaaacgtgaccttcattcttaccgtcgtccataaatacgttaggtatgtaccacatactgtcgcgaacgatgcgtacaatctcgtccatctcataatgatttactttttcataattaaagatgtgaaagaaaaccgaacaatatatttttttagtaatgtttatgcgagacatataaaataaactccgtgtttatgatgccggtaaatgtttttatcatcttggacggaatcgattttgtaatatgtcatggaaacaaatgaaacaggacattatcgctccatgataaattatttaatggagtaataaagtatctccatgggtaatttcgaaatcaagttatcgtctgtattaatgttgtccactatggagtcgatcctctcattgttctttacagtttctgtaatgatggacgttagttcttttttgtaccatttgatgtcggattctttgcgtatctcaatctgtggcgtttgcttcgtttaaataatatatcaaacatggagacgcctgatatgtaggcattcttcattctattaatgtctactctatagcgctttagttccttatgacgaccggagatatcatacttactttagaaggaaaatcatcatctaggattaaggcgtatctgatacaggcgaataatggttcaggatatagatagcgtatatctctattaaatgcgtcaatcatagtctctagagtgggatggtagctaagtaataaatcaactatcctcgttttgttttctcttctgtaactacttttctggatggccgtattgattatcgagcgtgatgttgtaacactcgctccatattccaataaccgctttgcaaattgtatattattgacatcgaccgcgtaatatagtagagttttattctcattatcgatcatatctatattatccatgtacttgcttagtatatcaaatacatctattagtatggtttcataacagtgatacccgcaattattaaatctcgataatatcagaccgtacatacatagacggccattgttcgatacgtgatttacagccatgtgtccattattttccacgataaaccttacgacgtttacatcgacgagattattattaacaaagtagtcgtgcagaggatagttgttgtccgttatctaacatgcatcgaacgaccatatcgccgtaatgtaagtagtttatcaacatggcttgtacgatggattcatcctgttgtctaaatctctttagaatgttatcgatgatgtagtggttatagtctctggaatcgtaagaagtaatactacgcattacgtcgacaagagtatgacgtctctcaataagaagattaacgatttccatgtctacattatatggggttactctaaatcgcttgtttagataatccgcctctaatatagggctgacgtcgtatactctacacgtgtccacatcctttattaataatttaacaatctctatatctatggttgagcaagaccagtagtattggatgggtaaagatcctccttcgtctctgccatggatggaaacattgttattgatcaaacatttaattacatccttggatagagattgagattctctatgagacgatatatagtaatgaagagagttcttacacatatcactgtcgtacatacaggtacgaaatacgtaaccggtgctgtaacattctgatttaagaagccatagcaatacttctggtctcggattaggcgtcgttacgtatatatccaccaatccgagaccattgattgcataattcgtattcttggacggacgtatccgtttatccacaattaggtattttagcagacgtaagtcgatattatccgaagacatatacgaatacagatcgaaatcatttatattcgacttgagttcgttagaggaattcgaatagctggatatcagtagatgcacaatttgagattttacgtatctatgcttactgtatgctcctagcggagttaatccttcgttgtttctacaaagtctctcgactccgcgagagagtaacagtcgaacaatcttaatgtctgtatcgcatttattgaagacgtaacaatgtagcgcattgtttcctcgtctatctatatgttttgataagttgtgacacgtttcaatttctagttttatttttttgtacgtcacatcttcatccagtagacgacatagaatacatgtgcaatccatagctattctggtgctaattattcctatttcacgaaaaatgatgaaggcaatcattcctcataagatgataaaaagtgtagtgagagagcatgaaggagatttagtatttagcagtgcggatatgatccaagagggtgagatagtcgttctcgttcagaatctttcgcagcataagtagtatgtcgatatacttatcgttgaagactcttccagagacgatagctgattgagtacaaagtccaatgattgcacgaagttcttcggcggttttcatggagtcatttctgatgaaacatttaatgatctccacgcaattgtcgatattgtcccacggaagtgaatccttcaactcaccaccaaagagctccgttgcatcagttctgaaagagatgagaagcctgtagagagaccctgcgctttctctatgggtccatctatgagaaacccacaggatgtattcagtcagacaatgtctgacgtcggccacggtattcagggagtccttagtagcgtggcaatgacagggtctgaactgggcacaaggagaggccattgtaaaggtagacctgtagccgtttatgctaatagagggctttaatttccatttttttaatgggttgtggatgaggaatgagagtgatatcatattgagatacgtagttatgtagaggtgtatttcctatattatttactttcggtttcatattttaccaactctttaataaatttcttttcacgatgcatcttattaaatgacgttttctcataagtggacatatagatgcagaagtaatgaagaaaagtattacctctatcatctacataattagggtctgctcctttttttaacaacttatacagtacgtagtagtagtttatcggttttaaatcaagtctagaatatatagtggattaatatatttttatattagctaaagctatctatactatcagaaagcatatcattctcaacttcatcatgagttaaatatttgtgtaatggatgtcatgaacattaaacgtattcatgacatactcctttaataggttttttaaaacagatgattcaaatccttcattcattagataacagtgtaacggagtcgtaccttctactagtttgtttatatcacagcattctacaaacagtctaaacaatagagaagacggacagactttaacgtataaatgacacatgttatcgatattcgttgatgaattattattaaacgtagttatgataaatgattctaacgacatctctcgctagagataaaatctagtatcgtatcattaaacatctttgcatcatactcgcatagcatagtttttcataattaatacaatatttaaaagacttattcggaaagtattttaatacatgtatcatcgatggagatccatatgaggagtcacttgtagttcttcagtagtaataacagtgctatcatcgatagtataattatatgtagaaggttcatatgttgttgtaattggagtaactgttggtagttcttccgtggaatcaataattatactaacagcaatagtataattatataaatatgttccgttgatatcacatattttaatgaactcatttctaacaccctcagctatatctgtccaattaaatgtagccaacaatctactacgttctctttgattgactacttgtacggtagcgacgctacactatctttattgtcttctacatgctccaattgaatgtcatgatacaacgcagtttttcttatgcatgtttcataacaccacgaacatgtcgcagtaagatatatagccagagataatttctgtaaattcatgattgccggtcataaacaagcccgtcaataattgtggctatatattcagtttatagagcaaaataattaagcacaatagcgcttaatctcaaaatatgttatgtttatttttttcatattaaacatactggttaaaatcctctaaaggctgatcttcatctataaatcaagatcataattacatttagacagtggtttcatgtttataaaaatgttctttttgtgtgaataaggaatatactaatcaataatcaaccatcgaccccattacgatagtatgcaggcaaccccccattagagaggtacgtgtaatcagtctctccagttttagtatttttataagtcattgttacataaacggcttttaaacagtctcctcgataataagccatatctggaaatttattaaatactcgagtcattttacgcacggtcaaaaaagtaagtaatgtcgacgacttcttacattctatagaaacacctagaatactcattttcttttggaaaatatcctcagactctgatttgaacaatgcacgacctatagtaaaccgtgaccaataagttatattagtcaatggtatatccaaaccatcaggtgtggatagtacgccgatagtccagtctttggtatcgatagtgtagttattgaactgagaagttaccgtatagtctttttggtcatctctaaacaaggaaactaatacctctacactattgaacgatttatcttccgtaatgggtggaataacgggaatataaagtggactagcgatggatgaagtcacgaatataagacacgctattaatccgtatatcatcattttgatattacttataataacgatttgtttaatttttagtttatactattaattgtaaatgatattattatttttttaagtattatcagctttagtttatactattactatttgtaatatttagacatagataaacgtgataaaagtctatttgtttatatttattgcggatagcagtatttccctataaaaagtatacgtcctgtgttgtctttaatcatgtacatgaatggatggtttatgtagaccttcgtacgatataccatcgaaaagttagtcataaatactcctgtaacggccgatgcttctgtatactcctcattaacatctataaacgtcgtatgtagaaatttttctacagtgatagtttcattacacatcttgctaaaatctgcataatatccgaatatattagtaagtcctaaattttctaaaatcggtaccagattatacggttctgtcatttccactttaaactttggcatatacaagtctatacttttagtagataacataccacaccattttttaaatttttcatctgttatatttttttctatgttatatataccttctatgtcgtccggtagtataattaccatactagagtttccctcgtatggaatatcgataatagagaatcctccgaataattcattaatatgtacatattgcaagttattctcggtacccaccatcatatcaacactggtaactatattcttagaaatataaaacttgtctgtatatgtaagatgtttagaaaatggatatttccacattgctttaaaatggacggcgctaacaactgtcatacgagtattaatggatagcggactagtcaataaggaattaattttaccatttgtcatcgtcttaacccattcgttgattagttcctttgtttggttagcattattaaagtttacagtttgaaaatcgtcttttattttttgtaggaaggaggcgtggaactcgatactatcgctaccgtatattttatttgcggtagctagtgtcgcacaatacggaatatctacgtccatgtcattattgtcatccttcttatcatcgggtgtattctcattcatattctctatatattttgatagttgttcagctgtagaaccagctgctccatgatttagaatagataaagtagataaaatagaaactggagaaatcaaaacattttcatcagggtgttttaagattagttctttaaagatatccatggtatagaccaaacaataacgataacgatatatatcataaataaataatgttaaatttcagtttatgtttgtaccccgtattcatacttaacaaattggtattgcgtacacaatcaatcatattacataccattaataatgcaagcataaaaaatcgttagtagatgtttctaaatataggttccgtaagcaaagaatataagaatgaagcggtaatgataaaatcaatcgttatctaaaatgatcatactcatttattttattctattatattaacacatacatttttaacagcaacacattcaatattgtattgttatttttatattatttacacaattaacaatatattattagtttatattactgaattaataatataaaattcccaatcttgtcataaacacacactgagaaacagcataaacacaaaatccatcaaaaatgtcgatgaaatatctgatgttgttgttcgctgctatgataatcagatcattcgccgatagtggtaacgctatcgaaacgacattgccagaaattacaaacgctacaacagatattccagctatcagattatgcggtccagagggagatggatattgtttacacggtgactgtatccacgctagagatatcgacggtatgtattgtagatgctctcatggttatacaggcattagatgtcagcatgtagtattagtagactatcaacgttcagaaaaaccaaacactacaacgtcatatatcccatctcccggtattgtgcttgtattagtaggcattattattatgtgttgtctattatctgtttataggttcactcgaagaactaataaactacctctacaagatatggttgtgccataatttttataaatttttttatgagtatttttacaaaaaaaatgtataaagtgtatgtcttatgtatatttataaaaatgctaagtatgcgatgtatctatgttatttgtatttatctaaacaatacctctacctctagatattatacaaaaattttttatttcggcatattaaagtaaaatctagttaccttgaaaatgaatacagtgggtggttccgtatcaccagtaagaacataatagtcgaatacagtatccgattgagattttgcatacaatactagtctagaaagaaatttgtaatcattttctgtgacgggagtccatatatctgtatcatcgtctagtttatcagtgtcccatgctatatttctgttatcatcattagttaatgaaaataactctcgtgcttcagaaaagtcaaatattgtatccatacatacatctccaaaactatcgcttatacgtttatctttaacgatacctatacctagatggttatttactaacagacattttccagatctattgactataactcctatagtttccacatcaaccaagtaatgatcatctattgttatataacaataacataactcttttccatttttatcagtatgtatatctatatcaacgtcgtcgttgtagtgaatagtagtcattgatctattatatgaaacggatatgtctagaacggcaattgtcttacgtccagttaacactttcgttgatttaaagtctagagtctttgcaaacataatatccttatccgactttatatttcctgtagggtggtataattttattttgcctccacatatcggtgtttccaaatatattactagacaatattccatatagttattagttaagggtacccaattagaacacgtacgcttattatcatcatttggatcgtatttcataaaagttattgtactatcgatgtcaacacattctacattttttaatcgtctatatagtatttttctgatattttctataatatcagaattgtcttccatcggaagttgtatactatcggaatcagttacatgtttaaataattctctgatgtcattccttatacaatcaaattcattattaaacagtttaatagtctgtagacctttatcgtcgtaaatatccattgtcttattagttacgcttatttttatgtgttttacgttgctttattatattttataagaatgattgtttgacgaatcacgagaactattaagacacattattaggtatatattataaaaaagtttttgattacgatgttataagaggaaagaggacacattaacatcatacatcaattaactacattcttataacatcgtaatcaaaagaattgcaattttgatgtataacaactgtcaatgggttatggaattgtatattacatattatacggtatgttggtaacgacaaataccgatcggtaatcgtttgccggtgtaatagaattatatatatctatctattacaccggctgagtatacataataataagttgtggtagtatgatctccatatttataatttaggactttgtattcagtatttttggaatcataaaaaataaaaaaaagttttactaatttaaaatttaaaaagtatttacatttttttcactgtttagtcgcggatatggaattcgatcctgccaaaatcaatacatcatctatagatcatgtaacaatattacaatacatagatgaaccaaatgatataagactaacagtatgcattatccgaaatattaataacattacatattatatcaatatcacaaaaataaatacacatttggctaatcaatttcgggcttggaaaaaacgtatcgccggaagggactatatgactaacttatctagagatacaggaatacaacaatcaaaacttactgaaactatacgtaactgtcaaaaaaatagaaacatatatggtctatatatacactacaatttagttattaatgtggttattgattggataaccgatgtgattgttcaatcaatattaagagggttggtaaattggtacatagctaataatacctatactccaaatacacccaataatacaacaaccatttctgagttggatatcatcaaaatactaaataaatacgaggacgtgtatagagtaagtaaagaaaaagaatgtggaatttgctatgaagttgtttactcaaaacgattagaaaacgatagatactttggtttattggattcgtgtactcatatattttgcataacatgcatcaatatatggcataaaacacgaagagaaaccggtgcgtcggataattgtcctatatgtcgtacccgttttagaaacataacaatgagcaagttctataagctagttaactaataaataaaaagtttaatttgttgacgacgtatgtcgttattttttctcgtataaaagattaatttgattctaatataatctttagtattggataaatatcaattcaaattaattccattagattatatcataaataaaaatagtagcacgcactacttcagccaaatattcttttttgaaacgccatctatcgtagtgaggacacaagtgaacctataatgagcaaatttattagtatcggttacatgaaggactttacgtagagtggtgattccactatctgtggtacgaacggtttcatcttctttgatgccatcacccagatgttctataaacttggtatcctcgtccgatttcatatcctttgccaaccaatacatatagctaaactcaggcatatgttccacacatcctgaacaatgaaattctccagaagatgttacaatgtctagatttggacatttggtttcaaccgcgttaacatatgagtgaacacacccatacatgaaagcgatgagaaataggattttcatcttgccaaaatatcactagaaaaaatttatttatcaattttaaaggtataaaaaatacttattgttgctcgaatattttgtatttgatggtatacggaagattagaaatgtaggtattatcatcaactgattctatggttttatgtattctatcatgtttcactattgcgttggaaataatatcatatgcttccacatatattttattttgttttaactcataatactcacgtaattctggattattggcatatctgtgaataattttagctccatgatcagtaaatattaatgagaacatagtattaccacctaccattatttttttcatttcgttcaattcttgattgcaaagatctatataatcattatagcgttgacttatggactctggaatcttagacgatgtacagtcatctataatcatggcatatttaatacattgttttatagcatagtagttatctacgatgttagatatttctctcaatgaatcaatcacacaatctaatgtaggtttatgacataatagcattttcagcagttcaatgtttctagattcgttgatggcaatggctatacatgtatatccgttatttgatctaatgttgacatctgaaccggattctagcagtaaagatactagagattgtttattatatctaacagccttgtgaagaagtgtttctcctcgtttgtcaatcatgttaatgtctttaagataaggtaggcaaatgtttatagtactaagaattgggcaagcataagacatgtcacaaagaccctttttgtatgtataagtgtagaaattataacatccatagttggatttacataggtgtccaatcgggatctctccatcatcgagatgattgacggcatctcccccttccttttttagtagatatttcatcgtgtaagaatcaatattaatatttctaaagtatccgtgtatagcctctttatttaccacagctccatattccaacatgcattccactaaagggatatcgatatcgccgaatgtcatatactcaattagtatatgttggaggacatccgagttcattgttttcaatatcaaagagatggtttccttatcatttctccatagtggtacaatactacacattattccgtgaggctttccattctccaaaaacaatttgaccaaatctacatctttattgtatctataatcactatttagataatcagccataattcctcgagtgcaacatgttagatcgtctatatatgaataagccgtgttatctattcctttcattaacaatttaacgatgtctatatctatatgagatgacttaatataatattgaagagctgtacaatagtttttatctatagaagacggcttgattccgtgattaattagacatttaacaacttccggacgcacatatgctctcgtatccgactctgaatacagatgagagatgatatacagatgcaatacggtaccgcaatttcgtagttgataatcatcatacgcgtatccgtactcgtcctcataaagaacactgcagccattttctatgaacaaatcaataattttaggaacaggatcattgtcattacataattttctataactgaacgatggttttcacatttaacactcaagtcaaatccatgttctaccaacacctttatcaagtcaacgtctacatttttggatttcatatagctgaatatattaaagtcatttatgttgctaaatccagtggcttctagtagagccatcgctatatcctttaactttaacatgtctactatttgtgtattcttctaatggggtagctgtctccaatttttgcgtaatggattagtgccactgtctagtagtagtttgacgacctcgacattattacaatgctcattaaaaaggtatgcgtgtaaagcattattcttgaattggttcctggtatcattaggatctctgtctctcaacatctgtttaagttcatcgagagccacctcctcattttccaaatagtcaaacattttgactgaatagaagtgaatgagctactgtgaactctatacacccacacaactaatgtcattaaatattatttttttgaatgtatttataccatgtcaaaaacttgtacaattattaataaaaataatttagtgtttaaattttaccagttccagattttacacctccgttaaccccactttttacaccactggacgaccctcctccccacattccaccgccaccagatgtataagttttagatcctttattactaccatcatgtccatggataaagacactccacatgccgccactaccccctttagaagacatattaataagacttaagagttaaggacaagtttaacaataaaattaatcacgagtaccctactaccaacctacactattatatgattatagtttctatttttacagtaccttaactaaagtttctagtcacaagagcaatactaccaacctacactattatatgattatagtttctatttttataggaacgcgtacgagaaaatcaaatgtctaatttctaacggtagtgttgataaacgattatcgtcaatggatacctcctctatcatgtcgtctattttcttactttgttctattaacttattagcattatatattatttgattataaaacttatattgcttattagcccaatctgtaaatatcggattattaacatatcgtttctttgtaggtttatttaacttgtacatcactgtaagcatgtccgtaccatttattttaatttgacgcatatccgcaatttctttttcgcagtcggttataaattctatatatgatggatacatgctacatgtgtacttataatcgactaatatgaagtacttgatacatattttcagtaacgatttattattaccacctatgaataagtacctgtgatcgtctaggtaatcaactgttttcttaatacattcgatggttggtaatttactcagaataatttccaatatcttaatatataattctgctatttctggaatatatttatctgccagtataacacaaatagtaatacatgtaaacccatattttgttattatattaatgtctgcgccattatctattaaccattctactaggctgacactatgcgacttaatacaatgataaagtatactacatccatgtttatctattttgtttatatcatcaatatacggcttacaaagttttagtatcgataacacatccaactcacgcatagagaaggtagggaataatggcataatatttattaggttatcatcattgtcattatctacaactaagtttccattttttaaaatatactcgacaactttaggatctctattgccaaatttttgaaaatatttatttatatgcttaaatctatataatgtagctccttcatcaatcatacatttaataacattgatgtatactgtatgataagatacatattctaacaatagatcttgtatagaatctgtatatcttttaagaattgtggatattaggatattattacgtaaactattacacaattctaaaatataaaacgtatcacggtcgaataatagttgatcaactatataattatcgattttgtgatttttcttcctaaactgtttacgtaaatagttagatagaatattcattagttcatgaccactatagttactatcgaataacgcgtcaaatatttcccgtttaatatcgcatttgtcaagataataatagagtgtggtatgttcacgataagtataataacgcatctctttttcgtgtgaaattaaatagtttatcacgtccaaagatgtagcataaccatcttgtgacctagtaataatataataatagagaactgttttacccattctatcatcataatcagtggtgtagtcgtaatcgtaatcgtctaattcatcatcccaattataatattcaccagcacgtctaatctgttctattttgatcttgtatccatactgtatgttgctacatgtaggtattcctttatccaataatagtttaaacacatctacattgggatttgatgttgtagcgtatttctctacaatattaataccatttttgatactatttatttctatacctttcgaaattagtaatttcaataagtctatatcgatgttatcagaacatagatattcgaatatatcaaaatcattgatatttttatagtcgactgacgacaataacaaaatcacaacatcgtttttgatattattatttttcttggtaacgtatgcctttaatggagtttcaccatcatactcatataatggatttgcaccactttctatcaatgattgtgcactgctggcatcgatgttaaatgttttacaactatcatagagtatcttatcgttaaccatgattggttgttgatgctatcgcattttttggtttctttcatttcagttatgtatggatttagcacgtttgggaagcataagctcatatgatttcagtactgtagtgtcagtactattagtttcgatcagatcaatgtctagatctatagaatcaaaacacgataggtcagaagataatgaatatctgtaggcttcttgttgtactgtaacttctcgttttgttagatggttgcatcgtgctttaacatcaatggtacaaattttatcctcgctttgtgtatcatattcgtccctactataaaattgtatattcagattatcatgagatgtgtatacgctaacggtatcaataaacggagcacaccatttagtcataaccgtaatccaaaaatttttaaagtatatcttaacgaaagaagttgtgtcattgtctacggtgtatggtactagatcctcataagtgtatatatctagagtaatgtttaatttatcaaatggttgataatatggatcctcatggcaatttcctaagacgaaaataagacataaacacgcaataaatctaattgcggacatggttactccttaaaaaaatactaataatcaccttggctatttagtaagtgtcatttaacactatactcatattaatccatggactcataatctctatacgggattaacggatgttctatatacggggatgagtagttctcttctttaactttatactttttactaatcatatttagactgatgtatgggtaatagtgtttgaagagctcgttctcatcatcagaataaatcaatatctctgtttttttgttatacagatgtattacagcctcatatattacgtaatagaacgtgtcatctaccttattaactttcaccgcatagttgtttgcaaatacggttaatcctttgacctcgtcgatttccgaccaatctgggcgtataatgaatctaaactttaatttcttgtaatcattcgaaataatttttagtttgcatccgtagttatcccctttatgtaactgtaaatttctcaacgcgatatctccattaataatgatgtcgaattcgtgctgtatacccatactgaatggatgaacgaataccgacggcgttaatagtaatttactttttcatctttacatattgggtactagttttactatcataagtttataaattccacaagctactatggaataagccaaccatcttagtataacacacatgtcttaaagtttattaattaattacatgttgttttatatatcgctacgaatttaaacagagaaatcagtttaggaaaaaaaattatctatctacatcatcacgtctctgtattctacgatagagtgctactttaagatgagacatatccgtgtcatcaaaaatatactccattaaaatgattattccggcagcgaacttgatattggatatatcacaacctttgttaatatctacgacaatagacagcagtcccatggttccataaacagtgagtttatctttctttgaagagatattttgtagagatcttataaaactgtcgaatgacatcgcatttatatctttagctaaatcgtatatgttaccatcgtaatatctaaccgcgtctatcttaaacgtttccatcgctttaaagacgtttccgatagatggtctcatttcatcagtcatactgagccaacaaatataatcgtgtataacatctttgatagaatcagactctaaagaaaacgaatcggctttattatacgcattcatgataaacttaatgaaaaatgtttttcgttgtttaagttggatgaatagtatgtcttaataattgttattatttcattaattaatatttagtaacgagtacactctataaaaacgagaatgacataactaatcataactagttatcaaagtgtctaggacgcgtaattttcatatggtatagatcctgtaagcattgtctgtattctggagctattttctctatcgcattagtgagttcagaatatgttataaatttaaatcgaataacgaacataactttagtaaagtcgtctatattaactcttttattttctagccatcgtaataccatgtttaagatagtatattctctagttactacgatctcatcgttgtctagaatatcacatactgaatctacatccaattttagaaattggtctgtgttacatatctcttctatattattgttgatgtattgtcgtagaaaactattacgtagaccattttctttataaaacgaatatatagtactccaattatctttaccgatatatttgcacacataatccattctctcaatcactacatctttaagattttcgttgttaagatatttggctaaactatataattctattagatcatcaacagaatcagtatatatttttctagatccaaagacgaactctttggcgtcctctataatattcccagaaaagatattttcgtgttttagtttatcgagatctgatctgttcatatacgccatgattgtacggtacgttatgataaccgcataaaataaaaatccattttcatttttaaccaatactattcataattgagattgatgtaatactttgttactttgaacgtaaagacagtacacggatccgtatctccaacaagcacgtagtaatcaaatttggtgttgttaaacttcgcaatatttatcaatttagatagaaacttatactcatcatctgttttaggaatccatgtattattaccactttccaacttatcattatcccaggctatgtttcgtccatcatcgttgcgcagagtgaataattcttttgtattcggtagttcaaatatataatccatgcatagatcggtaaagctattgtagatgtgatttttcctaaatctaatataaaactcgtttactagcaaacactttcctgatttatcgaccaagacacatatggtttctaaatctatcaagtggtggggatccatagttatgacgcagtaacatagattattaccttcttaactgtcgctaatatctatatatttattgttatcgtattggattctgcatatagatggcttgtatgtcaaagatatagaacacataaccaatttatagtcgcgctttacattctcgaatctaaagttaagagatttagaaaacattatatcctcggatgatgttatcactgtttctggagtaggatatattaaagtctttacagatttcgtccgattcaaataaatcactaaataatatcccacattatcatctgttagagtagtatcattaaatctattatattttatgaaagatatatcactgctcacctctatatttcgtacatttttaaactgtttgtataatatctctctgatacaatcagatatatctattgtgtcggtagacgataccgttacatttgaattaatggtgttccattttacaacttttaacaagttgaccaattcatttctaatagtatcaaacgctccatgattaaatattttaatagtatccattttatatcactacggacacaaagtagctgacataaaccattgtataatttttatgttttatgtttattagcgtacacattttggaagttccggcttccatgtatttcctggagagcaagtagatgatgaggaaccagataggttatatccgtacttgcacttaaagtttacattgtcgttgtatgagtatgatcttttaaacccgctagacaagtatccgtttgatattgtaggatgtggacatttaacaatctgacacgtgggtggatcggaccattctcctcctgaacacaggacaccagagttaccaatcaacgaatatccactattgcaactataagttacaacgcttccatcggtataaaaatcctcgtatccgttatgtcttccgttggatatagatggaggggattggcatttaacagattcacaaataggtgcctcgggattccataccatagatccagtagatcctaattcacaatacgatttagattcaccgatcaaatgatatccgctattacaagagtacgttatactagagccaaagtctactccgccaatatcaagttggccattatcgatatctcgaggcgatgggcatctccgtttaatacattgattaaagagtgtccatccagtacctgtacatttagcatatataggtcccattttttgctttctgtatccaggtagacatagatattctatagtgtctcctatgttgtaattagcattagcatcagtctccacactattcttaaatttcatattaatgggtcgtgacggaatagtacagcatgatagaacgcatcctattcccaacaatgtcaggaacgtcacgctctccaccttcatatttatttatccgtaaaaatgttatcctggacatcgtacaaataataaaaagcccatatatgttcgctattgtagaaattgtttttcacagttgctcaaaaacgatggcagtgacttatgagttacgttacactttggagtctcatctttagtaaacatatcataatattcgatattacgagttgacatatcgaacaaattccaagtatttgattttggataatattcgtattttgcatctgctataattaagatataatcaccgcaagaacacacgaacatctttcctacatggttaaagtacatgtacaattctatccatttgtcttccttaactatatatttgtatagataattacgagtctcgtgagtaattccagtaattacatagatgtcgccgtcgtactctacagcataaactatactatgatgtctaggcatgggagacttttttatccaacgatttttagtgaaacattccacatcgtttaatactacatatttttcatacgtggtataaactccacccattacatatatatcatcgtttacgaataccgacgcgcctgaatatctaggagtaattaagtttggaagtcttatccatttcgaagtgccgtgtttcaaatattctgccacacccgttgaaatagaaaattctaatcctcctattacatataactttccattgttaacacaagtactaacttctgattttaacgacgacatattagtaaccgttttccattttttcgtttcaagatctacccgcgatacggaataaacatgtctattgttaatcatgccgccaataatgtatagacaattatgtaaaacatttgcattatagaattgtctatctgtattaccgactatcgtccaatattctgttctaggagagtaatgggttattgtggatatataatcagagtttttaatgactactatattatgttttataccatttcgtgtcactggctttgtagatttggatatagttaatcccaacaatgatatagcattgcgcatagtattagtcataaacttgggatgtaaaatgttgatgatatctacatcgtttggatttttatgtatccactttaataatatcatagctgtaacatcctcatgatttacgttaacgtcttcgtgggataagatagttgtcagttcatcctttgataattttccaaattctggatcggatgtcaccgcagtaatattgttgattatttctgacatcgacgcattatatagttttttaattccatatcttttagaaaagttaaacatccttatacaatttgtggaattaatattatgaatcatagtttttacacatagatctactacaggcggaacatcaattattatggcagcaactagtatcatttctacattgtttatggtgatgtttatcttcttccagcgcatatagtctaatagcgattcaaacgcgtgatagtttataccattcaatataatcgcttcatcctttagatggtgatcctgaatgcgtttaaaaaaattatacggagatgccgtaataatttccttattcacttgtataatttccccattgatagaaaatatcacgctttccattcttgaagtactataagtaattatagtataatgtaaaggtttatatattcaatattttttataaaaaaatcatttcgacattaattcctttttaaatttccgtctatcatctatagaaacatattctatgaatttataaaatgcttttacgtgtcctatcgtaggcgatagaaccgctaaaaagcctattgaatttctacaaaagaatctattatatggtatagggagagtataaaacattaaatgcccgtacttattaaagtattcagtagccaatcctaactctttcgaatacttattaatggctcttgttctgtacgaatctatttttttgaacaacggacctagtggtatatcttgttctatgtatctaaaataatgtctgactagatccgttagtttaatatcctcagtcatcttgtctagaatggcaaatctaactgcgggtttaggctttagtttagtttttatatctacatctatgtctttatctaacaccaaaaatataatagctaatattttattacaatcatccggatattcttctacgatctcactaactaatgtttctttggttatactagtatagtcactatcggacaaataaagaaaatcagatgatcgatgaataatacatttaaattcatcatctgtaagatttttgagatgtctcattaaaatattattagggtcagtactcattatcattaggcagctattacttattttattatttttcaccatatagatcaatcattagatcatcaaaatatgtttcaatcatcctaaagagtatggtgaatgactcttcccatctaatttctgaacgttcaccaatgtctctagccactttggcactaatagcgatcattcgcttagcgtcttctatattattaactggttgattcaatctatctagcaatggaccgtcggacagcgtcattctcatgttcttaatcaatgtacatacatcgccgtcatctaccaattcatccaacaacataagctttttaaaatcatcattataataggtttgatcgttgtcatttctccaaagaatatatctaataagtagagtcctcatgcttagtaatttaactattttagttaacaactattttttatgttaaatcaattagtacaccgctatgtttaatacttattcatattttagtttttaggattgagaatcaatacaaaaattaatgcatcattaattttagaaatacttagtttccacgtagttaatgaaacatttgaactcatcgtacaagacgttctcgtacaggacgtaactataaaccggtttatatttgttcaagatagatacaaatccgataactttttttacgaattctacgggatccactttaaaagtgtcataccgggttctttttatttttttaaacagatcaatggtgtgatgttgattaggtcttttacgaatttgatatagaatagcgtttacatattctccataatggtcaatcgccatttgttcgtatgtcataaattctttaattatatgacactgtgtattgtttagttcatccttgttcattgttaggaatctatccaaaatggcaattatactagaactataggtgcgttgtatacacatattgatgtgtctgtttatacaatccatgatatttggatccatgctactaccttcgggtaaaattgtagcatcatataccatttctagtactttaggttcattattatccattgcagaggacgtcatgatcgcatcctaaaaaaatatattatttttatgttattttgttaaaaataatcatcgaatacttcgtaagatactccttcatgaacataatcagttacaaaacgtttatatgaagtaaagtatctacgatttttacaaaagtccggatgcataagtacaaagtacgcgataaacggaataataatagatttatctagtctatctttttctatagctttcatagttagatacatggtctcagaagtaggattatgtaacatcagcttcgataaaatgactgggttatttagtcttacacattcgctcatacatgtatgaccgttaactacagagtctacactaaaatgattgaacaatagatagtctaccattgtttcgtattcagatagtacagcgtagtacatggcatcttcacaaattatatcattgtctaatagatatttgacgcatcttatggatcccacttcaacagccatcttaaaatcggtaaaatcatattgctttcctttatcattaataatttctaaaacatcatctctatcataaaagatacaaatattaactgtttgatccgtaataacattgctagtcgatagcaatttgttaataagatgcgctgggctcaatgtcttaataagaagtgtaagaggactatctccgaatttgttttgtttattaacatccgttgatggaagtaaaagatctataatgtctacattcttgactgttttagagcatacaatatggagaggtgtatttccatcatgatctggttttgagggactaattcctagtttcatcatccatgagattgtagaagcttttggattgtctgacataagatgtctatgaatatgatttttgccaaatttatccactatcctggcttcgaatccgatggacattatttttttaaacactctttctgaaggatctgtacacgccaacaacggaccacatccttcttcatcaaccgagttgttaatcttggctccatactgtaccaataaatttattctctctatgacttcatcatctgttcccgagagataatatagaggcgttttatgctgtttatcacacgcgtttggatctgcgccgtgcgtcagcagcatcgcgactattctattattattaattttagaagctatatgcaatggataatttccatcatcatccgtctcatttggagagtatcctctatgaagaagttcttcgacaaatcgttcatctagtcctttaattccacaatacgcatgtagaatgtgataattatttccagaaggttcgatagcttgtagcatattcctaaatacatctaaatttttactattatatttggcataaagagatagataatactcggccgacataatgttgtccattgtagtataaaaattaatatttctatttctatttctgtatatttgcaacaatttactctctataacaaatatcataacttagttcttttatgtcaagaaggcactggtttagttcatctataaatgtcacgccataactaccacgcatgctatactcagaattatgataaagatatttatccttggggtgtaggtaatggggattaatctttgttggatcagtctctaagttaacacatgtcacacatgatccatttatagttatatcacacgatgatgatttatgaattgattccggaagatcgctatcgtattttgtggttccacaattcatttccatacatgttattgtcacactaatattatgatgaactttatctagccgctgagtggtaaacaacagaacagatagtttattatctttaccaacaccctcagccgctgccacaaatctctgatccgtatccatgatggtcatgtttatttctagtccgtatccagtcaacactatgttagcatttctgtcgatatagctttcactcatatgacactcaccaataatagtagaattaatgtcgtaatttacaccaatagtgagttcggcggcaaagtaccaataccggtaatcttgtcgaggaggacatatagtattcttgtattctaccgaatacccgagagatgcgatacaaaagagcaagactaatttgtaaaccatcttactcaaaatatgtaacaatagtacgatgcaatgagtaagacaataggaaatctatcttatatacacataattattctatcaattttaccaattagttagtgtaatgttaacaaaaatgtgggagaatctaattagtttttctttacacaattgacgtacatgagtctgagttccttgtttttgctaattatttcatccaatttattattcttgactatatcgagatcttttgtataggagtcagacttgtattcaacatgcttttctataatcattttagctatttcggcatcatccaatagtacattttccagattagcagaatagatattaatgtcgtatttgaacagagcctgtaacatctcaatgtctttattatctatagccaatttaatgtccggaatgaagagaagggaattattggtgtttgtcgacgtcatatagtcgagcaagagaatcatcatatccacgtgtccattttttatagtggtgtgaatacaactaaggagaatagccagatcaaaagtagatggtatttctgaaagaaagtatgatacaatacttacatcattaagcatgacggcatgataaaatgaagttttccatccagttttcccatagaacatcagtctccaatttttcttaacaaacagttttaccgtttgcatgttaccactatcaaccgcataatacaatgcagtgtttcccttgtcatcaaattgtgaatcatccagtccactgaatagcaaaatctttactattttggtatcttccaatgtggctgcctgatgtaatggaaattcattctctagaagatttttcaatgctccagcgttcaacaacgtacatactagacgcacgttattatcagctattgcataatacaaggcactatgtccatggacatccgccttaaatgtatctttactagagagaaagcttttcagctgcttagacttccaagtattaattcgtgacagatccatgtctgaaacgagacgctaattagtgtatattttttcattttttataattttgtcatattgcaccagaattaataatatctctaatagatctgattagtagatacatggctatcgcaaaacaacatatacacatttaataaaaataatatttattaagaaaattcagatttcacgtacccatcaatataaataaaataatgattccttacaccgtacccatattaaggagattccaccttacccataaacaatataaatccagtaatatcatgtctaatgatgaacacaaatggtgtattaaattccagtttttcaggagatgatctcgccgtagctaccataatagtagatgcctctgctacagttccttgttcgtcgacatctatctttgcattctgaaacattttataaatatataatgggtccctagtcatatgtttaaacgacgcattatctggattaaacatactaggagccatcatttcggctatcgacttaatatccctcttattttcgatagaaaatttagggagtttaagattgtacactttattccctaattgaaacgaccaatagtctaattttgcagccgtaatagaatctgtgaaatgggtcatattatcacctattgccaggtacatactaatattagcatccttatacggaaggcgtaccatgtcatattctttgtcatcgattgtgattgtatttccttgcaatttagtaactacgttcatcatgggaaccgttttcgtaccgtacttattagtaaaactagcattgcgtgttttagtgatatcaaacggatattgccatgtacctttaaaatatatagtattaatgattgcccatagagtattattgtcgagcatattagaatctactacattagacataccggatctacgttctactatagaattaattttattaaccgcatctcgtctaaagtttaatctatataggccgaatctatgatattgttgataatacgacggtttaatacacacagtattatctacgaaactttgataagttagatcagtgtacgtatatttagatgttttcagcttagctaatcctgatattaattctgtaaatgctggacccagatctctttttctcaaatccatagtcttcaataattctattctagtattacctgatgcaggcaatagcgacataaacatagaaaacgaatagccaaacggcgagaagacaatattatcatcttgaatatttttatacgctactataccggcattggtaaatccttgcagacgataggtagacgctgaacacgttaacgatagtatcaataacgcaatcatgattttatggtattaataattaaccttatttttatgttcggtataaaaaaattattgatgtctacacatccttttgtaattgacatctatatatccttttgtataatcaactctaatcactttaacttttacagttttccctaccagtttatccctatattcaacatatctatccatatgcatcttaacactctctgccaagatagcttcagagtgaggatagtcaaaaagataaatatatagagcataatccttctcgtatactctgccctttattacatcgcccgcattgggcaacgaataacaaaatgcaagcatcttgttaacgggctcgtaaattgggataaaaattatgtttttatatctattttattcaagagaatattcaggaatttctttttccggttgtatctcgtcgcagtatatatcatttgtacattgtttcatattttttaatagtttacaccttttagtaggactagtatcgtacaattcatagctgtattttgaattccaatcacgcataaaaatatcttccaattgttgacgaagacctaatccatcatccggtgtaatattaatagatgctccacatgtatccgtaaagtaatttcctgtccaatttgaggtacctatataggccgttttatcggttaccatatatttggcatggtttaccctagaatacggaatgggaggatcagcatctggtacaataaatagctttacttctatatctatgtttttagattttagcatagcgatagatcttaaaaagtttctcatgataaacgaagatcgttgccagcaactaatcaatagcttaacggatacttgtctgtctatagcggatcttcttaattcatcttctatataaggccaaaacaaaattttacccgccttcgaataaataatagggataaagttcataacagatacataaacgaatttactcgcatttctaatacatgacaataaagcggttaaatcattggttctttccatagtacatagttgttgcggcgcagaagcaataaatacagagtgtggaacaccacttacgttaatactaagaggatgatctgtattataatacgacggataaaagtttttccaattatatggtagattgttaactccaagataccagtatacctcaaaaatttgagtgagatccgctgccaagttcctattattgaagatcgcaatacccaattctttgacctgagttagtgatctccaatccatgttagcgcttcctaaataaatatgtgtattatcagatatccaaaattttgtatgaagaactcctcctaggatatttgtaatatctatgtatcgtacttcaactccggccatttgtagtctttcaacatcctttaatggtttgttagatttattgacggctactctaactcttactcctcttttgggtaattgtacaatctcgtttaatattatcgtgccgaaattcgtacccacttcatccgataaactccaataaaaagatgatatatctagtgtttttgtggtattggatagaatttccctccacatgttaaatgtagacaaatatactttatcaaattgcatacctataggaatagtctctgtaatcactgcgattgtattatccggattcattttatttgttaaaaaataatcctatatcacttcactctattaaaaatccaagtttctatttctttcatgactgattttttaacttcatccgtttccttatgaagatgatgtttggcaccttcataaatttttatttctctattacaatttgcatgttgcatgaaataatatgcacctaaaacatcgctaatctcattgtttgttccctggagtatgagagtcgggggggtgttaatcttggaaattatttttctaaccttgttggtagccttcaagacctgactagcaaatccagccttaattttttcatgattgattaatgggtcgtattggtatttataaactttatccatatctctagatactgattctggacatagctttccgactggcgcatttggtgtgatggttcccataagtttggcagctagcagattcagttttgaaacagcatctgcattaactagaggagacattagaatcattgctgtaaacaagtttggattatcgtaagaggctagtatagaaattgttgctcccatggaatgacccaataagtagatttaatagttaccacgtgctgtaccaaagtcatcaatcatcattttttcaccattacttcttccatgtccaatatgatcatgtgagaatactaaaattcctaacgatgatatgttttcagctagttcgtcataacgtccagaatgtttaccagctccatgacttatgaatactaatgccttaggatatgtaataggtttccaatatttacaatatatgtaatcattgtccagattgaacatacagtttgcactcatgattcacgttatataactatcaatattaacagttcgtttgatgatcatattatttttatgttttattgataattgtaaaaacatacaattaaatcaatatagaggaaggagacggatactgtcttttgtgagatagtcatggcgactaaatcagattatgaggatgctgttttttactttgtggatgatgataaaatatgtagtcgcgactccatcatcgatctaatagatgaatatatcacgtggagaaatcatgttatagtgtttaacaaagatattaccagttgtggaagactgtacaaggaattgatgaagttcgatgatgccgctatacagtactatggtattgataaaattaatgagattgtcgaagctatgagcgaaggagaccactacatcaattttacaaaagtccatgatcaggaaagtttattcgctaccataggaatatgtgctaaaatcactgaacattggggatacaaaaagatttcagaatctagattccaatcattgggaaacattacagatctgatgaccgacgataatataaacatcttgatactttttctagaaaaaaaattgaattgatgatataggggtcttcataacgcataattattacgttagcattctatatccgtgttaaaaaaaattatcctatcatgtatttgagagttttatatgtagcaaacatgatagctgtgatgccaataagctttagatattcacgcgtgctagtgttagggatggtattatctggtggtgaaatgtccgttatataatctacaaaacaatcatcgcatatagtatgcgatagtagagtaaacatttttatcgtttctactgggttcatacatcgtctacccaattcggttatgaatgaaattgtcgccaatcttacacccaaacccttgttatccattagcatagtattaacttcgttatttatgtcataaactgtaaatgattctgtagatgccatatcatacatgatattcatgtccctattataatcattactaactttatcacaatatatgttgataatatctatatatgatctagtctttgtgggcaactgtctatacaagtcgtctaaacgttgtttactcatatagtatcgaacagccatcattacatggtcccgttccgttgatagataatcgagtatgttagtggacttgtcaaatctatataccatattttctggaagtggatatacatagtcgtgatcaacattattgctagcctcatcttctatatcctgtactataccattatctatatcatctacataatctacgatattattatacataaacatcgacaacatactattgtcaattatctaagtcctgttgatccaaacccttgatctcctctatctgtactatctagagattgtacttcttccagttctggataatatatacgttgatagattagctgggctattctatcccccgtatttacattaaacgtacattttccattattaataagaataactcctatgtttcccctataatcttcgtctattacaccgcctcctatatcaatgccttttagggacagaccagacctaggagctattctaccatagcagaacttaggcatggacatactaatatctgtcttaattaactgtcgttctccaggagggatagtataatcgtaagcgctatataaatcatatccggcggcgtaaggtgattgcctagtaggagatttagctctgttagtttccttaacaaatctaactggtgagttaatattcatgttgaacataaaactaatattttatttcaaaattatttaccatcccatatattccatgaataagtgtgatgattgtacacttctatagtatctatatacgattcacgataaaatcctcctatcaatagcagtttattatccactatgatcaattctggattatccctcggataaataggatcatctatcagagtccatgtattgctggattcacaataaaattccgcatttctaccaaccaagaataaccttctaccgaacactaacgcgcatgatttataatgaggataataagtggatggtccaaactgccactgatcatgattgggtagcaaatattctgtagttgtatcagtttcagaatgtcctcccattacgtatataacattgtttatagatgccactgctggattacatctaggtttcagaagactcggcatattaacccaagcagcatccccgtggaaccaacgctcaacagatgtgggatttggtagacctcctactacgtataatttattgttagcgggtatcccgctagcatacagtctggggctattcatcggaggaattggaatccaattgtttgatatataatttacagctatagcattgttatgtatttcattgttcatccatccaccgatgagatatactacttctccaacatgagtacttgtacacatatggaatatatctataatttgatccatgttcataggatactctatgaatggatacttgtatgatttgcgtggttgtttatcacaatgaaatattttggtacagtctagtatccattttacattatttatacctctgggagaaagataatttgacctgattacatttttgataaggagtagcagatttcctaatttatttcttcgctttatataccacttaatgacaaaatcaactacataatcctcatctggaacatttagttcatcgctttctagaataagtttcatagatagataatcaaaattgtctatgatgtcatcttccagttccaaaaagtgtttggcaataaagtttttagtatgacataagagattggatagtccgtattctatacccatcatgtaacactcgacacaatattcctttctaaaatctcgtaagataaagtttatacaagtgtagatgataaattctacagaggttaatatagaagcacgtaataaattgacgacgttatgactatctatatatacctttccagtatatgagtaaataactatagaagttaaactgtgaatgtcaaggtctagacaaacccttgtaactggatctttatttttcgtgtatttttgacgtaaatgtgtgcgaaagtaaggagataactttttcaatatcgtagaattgactattatattgccacctatagcatcaataattgttttgaatttcttagtcatagacaatgctaatatattcttacagtacacagtattaacaaatatcggcatttatgtttctttaaaagtcaacatctagagaaaaatgattatctttttgagacataactcccattttttggtattcacccacacgtttttcgaaaaaattagtttttccttccaatgatatattttccatgaaatcaaacggattggtaacattataaatttttttaaatcccaattcagaaatcaatctatccgcgacgaattctatatatgttttcatcatttcacaattcattcctataagtttaactggaagagccgcagtaagaaattcttgttcaatggatactgcatctgttataatagatctaacggtttcttcactcggtggatacaataaatgtttaaacatcaaacatgcgaagtcgcagtgtagaccctcgtctctactaattagttcgttggaaaacgtgagtccgggcattaggccacgctttttaagccaaaatatggaagcgaatgatccggaaaagaagattccttctactgcagcaaaggcaataagtctctctccataaccggcgctgtcatgtatccacttttgagcccaatcggccttcttttttacacaaggcattgtttctatggcattaaagagatagtttttttcattactatctttaacataagtatcgatcaaaagactatacatttccgaatgaatgttttcaatggccatctgaaatccgtagaaacatctagcctcggtaatctgtacttctgtacaaaatcgttccgccaaattttcattcactattccgtcactggctgcaaaaaacgccaatacatgttttataaaatatttttcgtctggtgttagtttattccaatcattgatatctttagatatatctacttcttccactgtccaaaatgatgcctctgcctttttatacatgttccagatgtcatgatattggattgggaaaataacaaatctatttggatttggtgcaaggatgggttccataactaaattaacaatatcaataaattttttttcagttatctatatgcctgtacttggattttttgtacatcgatatcgccgcaatcactacaataattacaagtattattgatagcattgttattagtactatcataattaaattatcgacattcatgggtgctgaataatcgttattatcatcattatcattttgtaattgtgacatcatactaaataaatcgtttgcgagattgttgtgggaagcgggcatggaggatgcattatcattattatttaacgccttccatttggattcacaaatatggcgcgcgttcaacattttatggaaactataattttgtgaaaacagataacaagaaaactcgtcatcgttcaaatttttaacgatagtaaaccgattaaacgtcgagctaatttctaacgctagcgactctgttggatatgggtttccagatatatatcttttcagttcccctacgtatctataatcatctgtaggaaatggaagatatttccatttatctactgttcctaatatcatatgtggtggtgtagtagaaccattaagcgcgaaagatgttatttcgcatcgtattttaacttcgcaataatttctggttagataacgcactctaccagtcaagtcaatgatattagcctttacagatatattcatagtagtcgtaacgatgactccatcttttagatgcgatactcctttgtatgtaccagaatcttcgtacctcaaactcgatatatttaaacaagttaatgagatattaacgcgttttatgaatgatgatatataaccagaagttttatcctcggtggctagcgctataaccttatcattataataccaactagtgtgattaatatgtgacacgtcagtgtgggtacaaatatgtacattatcgtctacgtcgtattcgatacatccgcatacagccaacaaatataaaatgacaaatactctaacgccgttcgtacccatcttgatgcggtttaataaatgttttgatttcaatttattgtaaaaaaagattcggttttatactgttcgatattctcattgcttatattctcatctatcatctccacacagtcaaatccgtggttagcatgcacctcatcaaccggtaaaagactatcggactcttctatcattataactctagaatatttaatttggtcattattaatcaagtcaattatcttatttttaacaaacgtgagtattttactcattttttataaaaacttttagaaatatacagactctatcgtgtgtctatatcttctttttatatccaatgtatttatgtctgatttttcttcatttatcatatataatggtccaaattctacacgtgcttcggattcatccagatcattaaggttcttataattgtaacatccttctcttccctcttctacatcttccttcttattcttattcttagcgtcacagaatctaccacagcaggatcccatgacgagcgtcatattaaactaatccattttcaattataatatatgattagtaatgaccattaaaataaaaaatattcttcataaccggcaagaaagtgaaaagttcacattgaaactatgtcagtagtatacatcatgaaatgatgatatatatatactctattttggtggaggattatatgatataattcgtggataatcattcttaagacacatttcttcattcgtaaatcttttcacgttaaatgagtgtccatattttgcaatttcttcatatgatggcggtgtacgtggacgaggctgctcctgttcttgttgtggtcgccgactgtcgtgtttgcgtttatccctccattatcgcgattgcgtagatggagtactattatataccttgtaattaaatttttttattaattaaacgtataaaaacgttccgtatctgtatttaagagccagatttcgtctaatagaacaaatagctacagtaaaaataactagaataattgctacacccactagaaaccacggatcgtaatacggcaatcggttttcgataataggtggaacgtatattttatttaaggacttaacaattgtctgtaaaccacaatttgcttccgcggatcctgtattaactatctgtaaaagcatatgttggccgggcggagccgaacattctccgatatccaatttctgtatatctataatattattaacctccgcatacgcattacagttcttttctagcttggataccgcactaggtacatcgtctagatctattcctatttcctcagcgatagctcttctatccttttccggaagcaatgaaatcacttcaataaatgattcaaccatgagtgtgaaactaagtcgagaattactcatgcatttgttagttattcggagcgcgcaatttttaaactgtcctataacctctcctatatgaatagcacaagtgacattagtagggatagaatgttgagctaatttttgtaaataactatctataaaaagattatacaaagttttaaactctttagtttccgccatttatccagtctgagaaaatgtctctcataataaatttttccaagaaactaattgggtgaagaatggaaacctttaatctatatttatcacagtctgttttggtacacatgatgaattcttctaatgccgtactaaattcgatatctttttcgatttctggatatgtttttaataaagtatgaacaaagaaatggaaatcgtaataccagttatgtttaactttgaaattgttttttattttcttgttaatgattccagccacttgggaaaagtcaaagtcgtttaatgccgatttaatacgttcattaaaaacaaactttttatcctttagatgaattattattggttcattggaatcaaaaagtaagatattatcgggtttaagatctgcgtgtaaaaagttgtcgcagcatggtagttcgtagattttaatgtataacagagccatctgtaaaaagataaactttatgtattgtaccaaagatttaaatcctaatttgatagctaactcggtatctactttatctgccgaatacagtgctaggggaaaaattataatgtttcctctttcgtattcgtagttagttctcttttcatgttcgaaaaagtgaaacatgcggttaaaatagtttataacattaatattactgttaataactgccgggtaaaagtgggatagtaatttcacgaatttgatactgtcctttctctcgttaaacgcctttagaaaaactttagaagaatatctcaatgatagttcctgaccatccatagtttgtatcaataatagcaacatatgaagaacacgtttatacagagtatgtaaaaatgttaatttatagtttaatcccatggcccacgcacacacgattaattttttttcatctccctttagattgttgtatagaaatttgggtactgtgaactccgccgtagtttccatgggactatataattttgtggcctcgaatacaaattttactacatagttatctatcttaaaaactataccatatcctcctgtagatatgtgataaaaatcgtcgtttataggataaaatcgtttatccttttgttggaaaaaggatgaattaatgtaatcattctcttctatctttagtagtgtttccttattaaaattcttaaaataatttaacaatctaactgacggagcccaattttggtgtaaatctaattgggacattatattgttaaaatacaaacagtctcctaatataacagtatctgataatctatggggagacatccattgatattcaggggatgaatcattggcaacacccatttattgtacaaaaagccccaatttacaaacgaaagtccaggtttgatagagacaaactattaactattttgtctctgtttttaacacctccacagtttttaatttctttagtaatgaaattattcacaatatcagtatcttctttatctaccagagattttactaacttgataaccttggctgtctcattcaatagggtagtaatatttgtatgtgtgatattgatatctttttgaattgtttcttttagaagtgattctttgatggtgccagcatacgaattacaataatgcagaaactcggttaacatgcaggaattatagtaagccaattccaattgttgcctgtgttgtattagagtgtcaatatgagcaatggtgtccttgcgtttctctgatagaatgcgagcagcgattttggcgttatcatttgacgatatttctggaatgacgaatcctgtttctactaactttttggtaggacaaagtgaaacaatcaagaagatagcttctcctcctatttgtggaagaaattgaactcctctagatgatctactgacgatagtatctccttgacagatattggaccgaattacagaagtacctggaatgtaaagccctgaaaccccctcattttttaagcagattgttgccgtaaatcctgcactgtgaccaagatagagagctcctttggtgaatccatctctatgtttcagtttaaccaagaaacagtcagctggtctaaaatttccatctctatctaatacagcatctaacttgatgtcaggaactatgaccggtttaatgttatatgtaacattgagtaaatccttaagttcataatcatcactgtcatcagttatgtacgatccaaacaatgtttctactggcatagtggatacgaagatgctatccatcagaatgtttccctgattagtattttctatatagctattcttctttaaacgattttccaaatcagtaactatgttcatttttttaggagtaggacgcctagccagtatggaagaggattttctagatcctctcttcaacatctttgatctcaatggaatgcaaaaccccatagtgaaacaaccaacgataaaaataatattgtttttcactttttataattttaccatctgactcatggattcattaatatctttataagagctactaacgtataattctttataactgaactgagatatatacaccggatctatggtttccataattgagtaaatgaatgctcggcaataactaatggcaaatgtataaaacaacgaaattatactagagttgttaaagttaatattttctatgagctgttccaataaattatttgttgtgactgcgttcaagtcataaatcatcttgatactatccagtaaacagtctttaagttctggaatattatcatcccattgtaaagcccctaattcgactatcgaatatcctgctctgatagcagtttcaatatcgacggacgtcaatactgtaataaaggtggtagtattgtcatcatcgtgataaactacgggaatatggtcgttagtaggtacggtgactttacacaacgcgatatataactttccttttgtaccatttttaacgtagttgggacgtcctgcagggtattgttttgaagaaatgatatcgagaacagatttgatacgatatttgttggattcctgattattcactataatataatctagacagatagatgattcgataaatagagaaggtatatcgttggtaggataatacatccccattccagtattctcggatactctattgatgacactagttaagaacatgtcttctattctagaaaacgaaaacatcctacatggactcattaaaacttctaacgctcctgattgtgtctcgaatgcctcgtacaaggatttcaaggatgccatagattctttgaccaacgatttagaattgcgtttagcatctgatttttttattaaatcgaatggtcggctctctggtttgctaccccaatgataacaatagtcttgtaaagataaaccgcaagaaaatttatacgcatccatccaaataaccctagcaccatcggatgatattaatgtattattatagattttccatccacaattattgggccagtatactgttagcaacggtatatcgaatagattactcatgtaacctactagaatgatagttcgtgtactagtcataatatctttaatccaatctaagaaatttaaaattagattttttacactgttaaagttaacaaaggtattacccggatacgtggatatcatatatggcattggtccattatcagtaatagctccataaactgatacggcgatggtttttatatgtgtttgatctaacgaggaagaaattcgcgcccacaattcatctctagatatgtatttaatatcaaacggtaacacatcaatttcgggacgcgtatatgtttctaaatttttaatccaaatataatgatgacctatatgccctattatcatactgtcaactatagtacacctagagaacttacgatacatctgtttcctataatcgttaaattttacaaatctataacatgctaaaccttttgacgacaaccattcattaatttctgatatggaatctgtattctcgataccgtattgttctaaagccagtgctatatctccctgttcgtgggaacgctttcgtataatatcgatcaacggataatctgaagtttttggagaataatatgactcatgatctatttcgtccataaacaatctagacataggaattggaggcgatgatcttaattttgtgcaatgagtcgtcaatcctataacttctaatattgtaatattcatcatcgacataacactatctatgttatcatcgtatattagtataccacggccttcttcatttcgtgccaaaataatatacagtcttaaataattacgcaatatctcaatagtttcataattgttagctgttttcatcaaggtttgtatcctgtttaacatgatggcgttctataacgtctctattttctatttttaattttttaaatttttaacgatttactgtggctagatacccaatctctctcaaatatttttttagcctcgcttacaagctgtttatctatactattaaaactgacgaatccgtgattttggtaatgggttccgtcgaaatttgccgaagtgatatgaacatattcgtcgtcgactatcaacaattttgtattattctgaatagtgaaaaccttcacagatagatcattttgaacacacaacgcgtctagacttctggcggttgccatagaatatacgtcgttcttatcccaattaccaactagaagtctgatcttaactcctctattaatggctgcttctataatggagttgtaaatgtcaggccaatagtagctattaccgtcgacacgtgtagtgggaactatggccaaatgttcaatatctatactagtcttagccgacttgagtttatcaataactacatcagtgtctagatctctagaatatcccaataggtgttctggagaatcagtaaagaacactccacctataggattcttaatatgatacgcagtgctaactggcagacaacaagccgcagagcataaattcaaccatgaattttttgcgctattaaaggctttaaaagtatcaaatcttctacgaagatctgtggccagcgggggataatcagaatatacacctaacgttttaatcgtatgtatagatcctccagtaaatgacgcgtttcctacataacatctttcatcatctgacacccaaaaacaaccgagtagtagtcccacattattttttttatctatattaacggttataaaatttatatccgggcagtgactttgtagctctcccagatttcttttccctcgttcatctagcaaaactattattttaatccctttttcagatgcctcttttagtttatcaaaaataagcgcgcccctagtcgtactcagaggattacaacaaaaagatgctatgtatatatatttcttagctagagtgataatttcgttaaaacattcaaatgttgttaaatgatcggatctaaaatccatattttctggtagtgtttctaccagcctacattttgctcccgcaggtaccggtgcaaatggccacatttagttaacataaaaacttatacatcctgttctatcaacgattctagaatatcatcggctatatcgctaaaattttcatcaaagtcgacatcacaacctaactcagtcaatatattaagaagttccatgatgtcatcttcgtttatttctatatccgtatccattgtagattgttgaccgattatcgagtttaaatcattactaatactcaatccttcagaatacaatctgtgtttcattgtaaatttataggcggtgtatttaagttggtagattttcaattatgtatcaatatagcaacagtagttcttgctcctccttgattctagcatcctcttcattattttcttctacgtacataagcatgtccaatacgttagacaacacaccgacgatggcggccgccacagacacgaatatgactagaccgatgaccatttaaaaacccctctctagctttcacttaaactgtatcgattattcttttagaacatgtataatataaaaacattattctatttcgaatttaggcttccaaaaatttttcatccgtaaaccgataataatatatatagacttgttaatagtcggaataaatagattaatgcttaaactatcatcatctccacgattagagatacaatatttacattctttttgctgtttcgaaactttatcaatacacgttaatacaaacccaggaaggagatattgaaactgaggctgttgaaaatgaaacggtgaatacaataattcagataatgtaaaatcatgattccgtattctgatgatattagaactgctaatggatgtcgatggtatgtatctaggagtatctattttaacaaagcatcgatttgctaatatacaattatcattttgattaattgttattttattcatattcttaaaaggtttcatatttatcaattcttctacattaaaaatttccatttttaatttatgtagccccgcaatactcctcattacgtttcattttttgtctataatatccattttgttcatctcggtacatagattatccaattgagaagcgcatttagtagttttgtacattttaagtttattgacgaatcgtcgaaaactagttatagttaacattttattatttgataccctgatattaatacccctgccgttactattatttataactgatgtaacccacgtaacattagaattaattatcgatagtaatgcatcgacgcttccaaaattgtctattataaactcaccgataatttttttattgcatgttttcatattcattaggattatcaaatctttaatcttattacgattgtatgcgttgatattacaagacgtcattctaaaagacggaggatctccatcaaatgccagacaatcacgtacaaagtacatggaaataggttttgttctattgcgcatcatagattcatatagaacacccatagaaatactaatttgttttactctataaaatactaatgcatctatttcatcgttttgtataacgtctttccaagtgccaaattccaaatttttttcattgatagtaccaaattcttctatctctttaactacttgcatagataggtaattacagtgatgcctacatgccgttttttgaaactgaatagatgcgtctagaagcgatgctacactagtcacaatcaccactttcatatttagaatatatgtatgtaaaaatatagtagaatttcattttgtttttttctatgctataaatgaattctcattttgcatctgctcatactccgttttatatcaataccaaagaaggaagatatctggttctaaaagccgttaaagtatgcgatgttagaactgtagaatgcgaaggaagtaaagcttcctgcgtactcaaagtagataaaccctcatcgcccgcgtgtgagagaagaccttcgtccccgtccagatgcgagagaatgaataaccctggaaaacaagtcccgtttatgaggacggacatgctacaaaatatgttcgcggctaatcgcgataatgtagcttctagacttttgtcctaaaatactattatatccttttcgatattaataaatccgtgtcgtccaggttttttatctctttcagtatgtgaatagataggtattttatctctattcatcatcgaatttaagagatccgataaacattgtttgtattctccagatgtcagcatctgatacaacaatatatgtgcacataaacctctggcacttatttcatgtaccttccccttatcactaaggagaatagtatttgagaaatatgtatacatgatattatcatgaattagatatacagaatttgtaacactctcgaaatcacacgatgtgtcggcgttaagatctaatatatcactcgataacacattttcatctagatacactagacattttttaaagctaaaatagtctttagtagtgacagtaactatgcgattattttcatcgatgatacatttcatcggcatattattacgcttaccatcaaagactataccatgtgtatatctaacgtattctagcatggttgccatacgtgcattaaacttttcaggatctttggatagatcttccaatctatctatttgagaaaacatttttatcatgttcaatagttgaaacgtcggatccactatatagatattatctataaagattttaggaactacgttcatggtatcctggcgaatattaaaactatcaatgatatgattatcgttttcatcttttatcaccatatagtttctaagatatgggattttacttaatataatattatttcccgtgataaattttattagaaaggccaaatctataagaaaagtcctagaattagtctgaagaatatctatatcgccgtaccgtatatttggattaattagatatagagaatatgatccgtaacatatacaacttttattatggcgtctaagatattcttccatcaacttattaacatttttgactagggaagatacattatgacgtcccattacttttgccttgtctattactgcgacgttcatagaatttagcatatctcttgccaattcttccattgatgttacattataagaaattttagatgaaattacatttggagctttaatagtaagaactcctaatatgtccgtgtatgtggtcactaatacagattgtagttctataatcgtaaataatttacctatattatatgtttgagtctgtttagaaaagtagctaagtatacgatcttttatttctgatgcagatgtatcaacatcggaaaaaaatctttttttattcttttttactaaagatacaaatatgtctttgttaaaaacagttattttctgaatatttctagcttgtaattttaacatatgatattcgttcacactaggtactctgcctaaataggtttctataatctttaatgtaatattaggaagagtattctgatcaggattcctattcattttgaggatttaaaactctgattattgtctaatatggtctcaacacaaactttttcacagagcgatagagtttttgataactcgtttttcttaagaaatataaaactactgtttccagagctcgctctatcttttattttatctaattcgatacaaactcctgatactggttcagaaagtaattcattaattttcagtcctttatagaagatatttaatatagataatacaaaattttcagttcttgatatcgatctgattgatcctagaactagatatattaataacgtgctcattaggcagtttatggcagcttgataattagatatagtatattccagttcatatttattagataccgcattgcccagattttgatattctatgaattcctctgaaaataaatccaaaataactagacattctattttttgtggattagtgtactctcttccctctatcatgttcactactggtgtccacgatgataaatatctagagggaatataatatagtccataggatgccaatctagcaatgtcgaataactgtaatttgattcttcgttcttcattatgaattgattcttgaggtataaacctaacacaaattatattattagacttttcgtatgtaatgtctttcatgttataagtttttaatcctggaatagaatctattttaatgaggcttttaaacgcagagttctccaacgagtcaaagcataatactctgttgtttttcttatatacgatgttacgattttcttctttgaatggaataggtttttgaattagtttataattacaacataatagataaggaagtgtgcaaatagtacgcggaaaaaacataatagctcccctgttttcatccatggttttaagtaaatgatcactggcttctttagtcaatggatattcgaacattaaccgtttcatcatcattggacagaatccatatttcttaatgtaaagagtgatcaaatcattgtgtttattgtaccatcttgttgtaaatgtgtattcggttatcggatctgctcctttttctattaaagtatcgatgtcgatctcgtctaagaattcaactatatcgacatatttcatttgtatacacataaccattactaacgtagaatgtataggaagagatgtaacgggaacagggtttgttgattcgcaaactattctaatacataattcttctgttaatacgtcttgcacgtaatctattatagatgccaagatatctatataattattttgtaagatgatgttaactatgtgatctatataagtagtgtaataattcatgtatttcgatatatgttccaactctgtctttgtgatgtctagtttcgtaatatctatagcatcctcaaaaaatatattcgcatatattcccaagtcttcagttctatcttctaaaaaatcttcaacgtatggaatataataatctattttacctcttctgatatcattaatgatatagtttttgacactatcttctgtcaattgattcttattcactatatctaagaaacggatagcgtccctaggacgaactactgccattaatatctctattatagcttctggacataattcatctattataccagaattaatgggaactattccgtatctatctaacatagttttaagaaagtcagaatctaagacctgatgttcatatattggttcatacatgaaatgatctctattgatgatagtgactatttcattctctgaaaattggtaactcattctatatatgctttccttgttgatgaaggatagaatatactcaatagaatttgtaccaacaaactgttctcttatgaatcgtatatcatcatctgaaataatcatgtaaggcatacatttaacaattagagacttgtctcctgttatcaatatactattcttgtgataatttatgtgtgaggcaaatttgtccacgttctttaattttgttatagtagatatcaaatccaatggagctacagttcttggcttaaacagatatagtttttctggaacgaattctacaacattattataaaggactttgggtagataagtgggatgaaatcctattttaattaatgcgatagccttgtcctcgtgcagatatccaaacgcttttgtgatagtatggcattcattgtctagaaacgctctacgaatatctgtgacagatatcatctttagagaatatactagtcgcgttaatagtactacaatttgtattttttaatctatctcaataaaaaaattaatatgtatgattcaatgtataactaaactactaactgttattgataactagaatcagaatctaatgatgacgtaaccaagaagtttatctactgccaatttagctgcattatttttagcatctcgtttagattttccatctgccttatcgaatactcttccgtcgatgtctacacaggcataaaatgtaggagagttactaggccccactgattcaatacgaaaagaccaatctctcctagtaatttggcagtactcattaataacggtgacagggttagcacctttccaatcaataatttttttagccggaataacatcatcaaaagacttatgatcctctctcattgatttttcgcgggatacatcatctattatggcgtcagccataacatcagcatccggcttatccgcctccgttgtcataaaccaacgaggaggaatatcgtcggagctgtacaccatagcactacgttgaagatcgtacagagctttattaacttctcgcttctccatattaagttgtctagttagttgtgcagcagtagctccttcgattccaatggttttaatagcctcacacacaatctctgcgttagaacgttcgtcgatatagattttagacatttttagagagaactaacacaaccagcaataaaactgaacctactttatcatttttttattcatcatcctctggtggttcgtcgttcctatcgaatgtggatctgattaacccgtcatctataggtgatgctggttctggagattctggaggagatggattattatctggaagaatctctgttatttccttgttttcatgtatcgattgcgttgtaacattaagattgcgaaatgctctaaatttgggaggcttaaagtgttgtttgcaatctctacacgcatgtctaactagtggaggttcgtcagcggctctagtttgaatcatcatcggcgtagtattcctacttttacagttaggacacggtgtattgtatttctcgtcgagaacgttaaaataatcgttgtaactcacatcctttattttatctatattgtattctactcctttcttaatgcattttataccgaataagagatagcgaaggaattctttttcggtgccgctagtacccttaatcatatcacatagtgttttatattccaaatttgtggcaatagacggtttatttctatacgatagtttgtttctggaatcctttgagtattctataccaatattattctttgattcgaatttagtttcttcgatattagattttgtattacctatattcttgatgtagtactttgatgatttttccatggcccattctattaagtcttccaagttggcatcatccacatattgtgatagtaattctcggatatcagtagcggctaccgccattgatgtttgttcattggatgagtaactactaatgtatacattttccatttataacacttatgtattaactttgttcatttatattttttcattattatgttgatattaacaaaagtgaatatatatgttaataattgtattgtggttatacggctacaatttcataatgagtggaagtcagtgtccgatgatcaatgacgatagctttactctgaaaagaaagtatcaaatcgatagtgcggagtcaacaataaaaatggataagaagaggataaagtttcagaatagagccaaaatggtaaaagaaataaatcagacaataagagcagcacaaactcattacgagacattgaaactaggatacataaaatttaagagaatgattaggactactactctagaagatatagcaccatctattccaaataatcagaaaacttataaactattctcggacatttcagccatcggcaaagcatcacagaatccgagtaagatggtatatgctctgctgctttacatgtttcccaatttgtttggagatgaccatagattcattcgttatagaatgcatccaatgagtaaaatcaaacacaagatcttctctcctttcaaacttaatcttattagaatattagtggaagaaagattctataataatgaatgcagatctaataaatggagaataattggaacacaagttgataaaatgttgatagctgaatctgataaatatacaatagatgcaaggtataacctaaaacccatgtatagaatcaagggaaaatctgaagaagataccctcttcatcaaacagatggtagaacaatgtgtgacatcccaggaattggtggaaaaagtgttgaagatactgtttagagatttgttcaagagtggagaatacaaagcatacagatacgatgatgatgtagaaaatggatttattggattggatacactaaaattaaacattgttcatgatatagttgaaccatgtatgcctgttcgtaggccagtggctaagatactgtgtaaagaaatggtaaataaatactttgagaatccgctacatattattggtaaaaatcttcaagagtgcattgactttgttagtgaataggcatttcatctttctccaatactaattcaaattgttaaattaataatggatagtataaatagttattagtgataaaatagtaaaaataattattagaataagagtgtagtatcatagataactctcttctataaaaatggattttattcgtagaaagtatcttatatacacagtagaaaataatatagattttttaaaggatgatacattaagtaaagtaaacaattttaccctcaatcatgtactagctctcaagtatctagttagcaattttcctcaacacgttattactaaggatgtattagctaataccaatttttttgttttcatacatatggtacgatgttgtaaagtgtacgaagcggttttacgacacgcatttgatgcacccacgttgtacgttaaagcattgactaagaattatttatcgtttagtaacgcaatacaatcgtacaaggaaaccgtgcataaactaacacaagatgaaaaatttttagaggttgccgaatacatggacgaattaggagaacttataggcgtaaattatgacttagttcttaatccattatttcacggaggggaacccatcaaagatatggaaatcatttttttaaaactgtttaagaaaacagacttcaaagttgttaaaaaattaagtgttataagattacttatttgggcatacctaagcaagaaagatacaggcatagagtttgcggataatgatagacaagatatatatactctatttcaacaaactggtagaatcgtccatagcaatctaacagaaacgtttagagattatatctttcccggagataagactagctattgggtgtggttaaacgaaagtatagctaatgatgcggatatcgttcttaatagacacgccattaccatgtatgataaaattcttagttatatatactctgagataaaacaaggacgcgttaataaaaacatgcttaagttagtttatatctttgagcctgaaaaagatatcagagaacttctgctagaaatcatatatgatattcctggagatatcctatctattattgatgcaaaaaacgacgattggaaaaaatattttattagtttttataaagctaattttattaacggtaatacatttattagtgatagaacgtttaacgaggacttattcagagttgttgttcaaatagatcccgaatatttcgataatgaacgaattatgtctttattctctacgagtgctgcggacattaaacgatttgatgagttagatattaataacagttatatatctaatataatttatgaggtgaacgatatcacattagatacaatggatgatatgaagaagtgtcaaatctttaacgaggatacgtcgtattatgttaaggaatacaatacatacctgtttttgcacgagtcggatcccatggtcatagagaacggaatactaaagaaactgtcatctataaaatccaagagtagacggctgaacttgtttagcaaaaacattttaaaatattatttagacggacaattggctcgtctaggtcttgtgttagatgattataaaggagacttgttagttaaaatgataaaccatcttaagtctgtggaggatgtatccgcattcgttcgattttctacagataaaaaccctagtattcttccatcgctaatcaaaactattttagctagttataatatttccatcatcgtcttatttcaaaggtttttgagagataatctatatcatgtagaagaattcttggataaaagcatccatctaaccaagacggataagaaatatatacttcaattgataagacacggtagatcatagaacagaccaaatatattattaataatttgtatatacatagatataattatcacatattaaaaattcacacatttttgataaatgggaactgctgcaacaattcagactcccaccaaattaatgaataaagaaaatgcagaaatgattttggaaaaaattgttgatcatatagttatgtatattagtgacgaatcaagtgattcagaaaataatcctgaatatattgattttcgtaacagatacgaagactatagatctctcattataaaaagtgatcacgagtttgtaaagctatgtaaaaatcatgcagagaaaagttctccagaaacgcaacaaatgattatcaaacacatatacgaacaatatcttattccagtatctgaagtactattaaaacctataatgtccatgggtgacataattacatataacggatgtaaagacaatgaatggatgctagaacaactctctaccctaaactttaacaatctccgcacatggaactcatgtagcataggcaatgtaacgcgtctgttttatacattttttagttatctgatgaaagataaactaaatatataagtataatcccattctaatactttaacctgatgtattacctgcatcttattagaatattaacctaactaaaagacataacataaaaactcattacatagttgataaaaagcggtaggatataaatattatggctgccaccgttccgcgttttgacgacgtgtacaaaaatgcacaaagaagaattctagatcaagaaacattttttagtagaggtctaagtagaccgttaatgaaaaacacatatctatttgataattacgcgtatggatggataccagaaactgcaatttggagtagtagatacgcaaacttagatgcaagtgactattatcccatttcgttgggattacttaaaaagttcgagtttctcatgtctctatataaaggtcctattccagtatacgaagaaaaagtaaatactgaattcatagccaatggatcgttctctggtagatacgtatcatatcttcgaaagttttctgctcttccaacaaacgagtttattagttttttgttactgacttccattccaatctataatatcttgttctggtttaaaaatactcagtttgatattactaaacacacattattcagatacgtctatacagataatgccaaacacctggcgttggctaggtatatgcatcaaacaggagactataagcctttgtttagtcgtctcaaagagaattatatatttaccggtcccgttccaataggtatcaaagatatagatcaccctaatcttagtagagcaagaagtccatccgattatgagacattagctaatattagtactatattgtactttaccaagtatgatccggtattaatgtttttattgttttacgtacctgggtattcaattactacaaaaattactccagccgtagaatatctaatggataaactgaatctaacaaagagcgacgtacaactgttgtaaattattttatgcttcgtaaaatgtaggttttgaaccaaacattctttcaaagaatgagatgcataaaactttattatccaatagattgactatttcggacgtcaatcgtttaaagtaaacttcgtaaaatattctttgatcactgccgagtttaaaacttctatcgataattgtctcatatgttttaatatttacaagttttttggtccatggtacattagccggacaaatatatgcaaaataatatcgttctccaagttctatagtttctggattatttttattatattcagtaaccaaatacatattagggttatctgcggatttataatttgagtgatgcattcgactcaacataaataattctagaggagacgatctactatcaaattcggatcgtaaatctgtttctaaagaacggagaatatctatacatacctgattagaattcatccgtccttcagacaacatctcagacagtctggttttgtacatcttaatcatattcttatgaaacttggaaacatctcttctagtttcactagtacctttattaattctctcaggtacagattttgaattcgacgatgccgagtatttcatcgttgtatatttcttcttcgattgcataatcagattcttatataccgcctcaaactctattttaaaattattaaacaatactctactattaatcagtcgttctaactctttcgctatttctatagacttatctacatcttgactgtctatctctgtaaacacggagtcggtatctccatacacgctacgaaaacgaaatctgtaatctataggcaacgatgttttcacaatcggattaatatctctatcgtccatataaaatggattacttaatggattggcaaaccgtaacataccgttagataactctgctccatttagtaccgattctagatacaagatcattctacgtcctatggatgtgcaactcttagccgaagcgtatgagtatagagcactatttctaaatcccatcagaccatatactgagttggctactatcttgtacgtatattgcatggaatcataaatggccttttcagttgaactggtagcctgttttaacatctttttatatctggctctctctgccaaaaatgttcttaatagtctaggaatggttccttctatcgatctatcgaaaattgctatttcagagatgaggttcggtagtctaggttcacaatgaaccgtaatatatctaggaggtggatatttctgaagcaatagctgattatttatttcttcttccaatctattggtactaacaacgacaccgactaatgtttccggagatagatttccaaagatacacacattaggatacagactgttataatcaaagattaatacattattactaaacattttttgttttggagcaaataccttaccgccttcataaggaaacttttgttttgtttctgatctaactaagatagttttagtttccaacaatagctttaacagtggacccttgatgactgtactcgctctatattcgaataccatggattgaggaagcacatatgttgacgcacccgcgtctgtttttgtttctactccataatactcccacaaatactgacacaaacaagcatcatgaatacagtatctagccatatctaaagctatgtttagattataatccttatacatctgagctaaatcaacgtcatcctttccgaaagataatttatatgtatcattaggtaaagtaggacataatagtacgactttaaatccattttcccaaatatctttacgaattactttacatataatatcctcatcaacagtcacataattacctgtggttaaaacctttgcaaatgcagcggctttgcctttcgcgtccgtagtatcgtcaccgatgaacgtcatttctctaactcctctatttaatactttacccatgcaactgaacgcgttcttggatatagaatccaatttgtacgaatccaatttttcagatttttgaatgaatgaatatagatcgaaaaatatagttccattattgttattaacgtgaaacgtagtattggccatgccgcctactcccttatgactagactgatttctctcataaatacagagatgtacagcttcctttttgtccggagatctaaagataatcttctctcctgttaataactctagacgattagtaatatatctcagatcaaagttatgtccgttaaaggtaacgacgtagtcgaacgttagttccaacaattgtttagctattcgtaacaaaactatttcagaacatagaactagttctcgttcgtaatccatttccattagtgactgtatcctcaaacatcctctatcgacggcttcttgtatttcctgttccgttaacatctcttcattaatgagcgtaaacaataatcgtttaccacttaaatcgatataacagtaacttgtatgcgagattgggttaataaatacagaaggaaacttcttatcgaagtgacactctatatctagaaataagtacgatcttgggatatcgaatctaggtatttttttagcgaaacagttacgtggatcgtcacaatgataacatccattgttaatctttgtcaaatattgctcgtccaacgagtaacatccgtctggagatatcccgttagaaatataaaaccaactaatattgagaaattcatccatggtggcattttgtatgctgcgtttctttggctcttctatcaaccacatatctgcgacggagcattttctatctttaatatctagattataacttattgtctcgtcaatgtctatagttctcatctttcccaacggcctcgcattaaatggaggaggagacaatgactgatatatttcgtccgtcactacgtaataaaagtaatgaggaaatcgtataaatacggtctcaccatttcgacatctggatttcagatataaaaatctgttttcaccgtgactttcaaaccaattaatgcaccgaacatccatttatagaatttagaaatatattttcatttaaatgaatcccaaacattggggaagagccgtatggaccattatttttatagtactttcgcaagcgggtttagacggcaacatagaagcgtgtaaacgaaaactatatactatagtcagcactcttccatgtcctgcatgtagacggcacgcgactatcgctatagaggacaataatgtcatgtctagcgatgatctgaattatatttattattttttcatcagattatttaacaatttggcatctgatcccaaatacgcgatcgatgtgacaaaggttaaccctttataaacttaacccattataaaacttatgattagtcacaactgaaataaccgcgtgattattttttggtataattctacacggcatggtttctgtaactatgaattcaacccccgttacattagtgaaatctttaacaaacagcaagggttcgtcaaagacataaaactcattgtttacaatcgaaatagaccccctatcacacttaaaataaaaaatatccttatcctttaccaccaaataaaattctgattggtcaatgtgaatgtattcacttaacagttccacaaatttatttattaactccgaggcacatacatcgtcggtattttttatggcaaactttactcttccagcatccgtttctaaaaaaatattaacgagttccatttatatcatccaatattattgaaatgacgttgatggacagatgatacaaataagaaggtacggtacctttgtccaccatctcctccaattcatgctctattttgtcattaactttaatgtatgaaaacagtacgccacatgcttccatgacagtgtgtaacactttggatacaaaatgtttgacattagtataattgttcaagactgtcaatctataatagatagtagctataatatattctatgatggtattgaagaagatgacaaccttggcatattgatcatttaacacagacatggtatcaacagatagcttgaatgaaagagaatcagtaattggaataagcgtcttctcgatagagtgtccgtataccaacatgtctgatattttgatgtattccattaaattatttagttttttctttttattttcgttaaacagcatttctgtcaacggaccccaacatcgttgaccgattaagttttgattgatttttccgtgtaatgcgtatctagtcagatcgtatagcctatccaataatccatcatctgtgcgtagatcacatcgtacactttttaattctctatagaagagcgacagacatctggagcaattacagacagcaatttctttattctctacagatgtaagatacttgaagacattcctatgatgatgcagaattttggataacacggtattgatggtatctgttaccataattcctttgatggctgatagtgtcagagcacaagatttccaatctttgacaatttttagcaccattatctttgttttgatatctatatcagacagcatggtgcgtctgacaacacagggattaagacggaaagatgaaatgattctctcaacatcttcaatggataccttgctattttttctggcattatctatatgtgcgagaatatcctctagagaatcagtatcctttttgatgatagtggatctcaatgacatgggacgtctaaaccttcttattttatcaccagattgcatggtgatttgtcttctttcttttatcataatgtaatctctaaattcatcggcaaattgtctatatctaaaatcataatatgagatgtttacctctacaaatatctgttcgtccaatgttagagtatctacatcagttttgtattccaaattaaacatggcaacggatttaattttatattcctctattaagtcctcgtcgataataacagaatgtagataatcatttaatccatcgtacatggttggaagatgcttgttgacaaaatctttaattgtcttgatgaaggtgggactatatctaacatcttgattaataaaatttataacattgtccataggatactttgtaactagttttatacacatctcttcatcggtaagtttagacagaatatcgtgaacaggtggtatattatattcatcagatatacgaagaacaatgtccaaatctatattgtttaatatattatatagatgtagcgtagctcctacaggaatatctttaactaagtcaatgatttcatcaaccgttagatctattttaaagttaatcatataggcattgatttttaaaaggtatgtagccttgactacattctcattaattaaccattccaagtcactgtgtgtaagaagattatattctatcataagcttgactacatttggtcccgataccattaaagaattcttatgatataaggaaacagcttttaggtactcatctactctacaagaattttggagagccttaacgatatcagtgacgtttattatttcaggaggaaaaaacctaacattgagaatgtcggagttaatagcttccagatacagtgattttggcaatagtccgtgtaatccataatccagtaacacgagctggtgcttgctagacaccttttcaatgtttaatttttttgaaataagctttgataaagccttcctcgcaaattccggatacatgaacatgtcggcgacatgattaagtattgttttttcattatttttatattttctcaacaagttctcaataccccaatagatgatagaatatcacccaatgcgtccatgttgtctatttccaacaggtcgctatatccaccaatagaagtttttccaaaaaagattctaggaacagttctaccaccagtaatttgttcaaaatagtcacgcaattcattttcgggtttaaattctttaatatcgacaatttcatacgctcctcttttgaaactaaacttatttagaatatccagtgcatttctacaaaaaggacatgtatacttgacaaaaattgtcactttgttattggccaacctttgttgtacaaattcctcggccattttaatatttaagtgatataaaactatctcgacttatttaactctttagtcgagatatatggacgcagatagctatatgatagccaactacagaaggcaaacgctataaaaaacataattacgacgagcatatttataaatatttttattcagcattacttgatatagtaatattaggcacagtcaaacattcaaccactctcgatacattaactctctcattttctttaacaaattctgcaatatcttcgtaaaaagattcttgaaactttttagaatatctatcgactctagatgaaatagcgttcgtcaacatactatgttttgtatacataaaggcgcccattttaacagtttctagtgacaaaatgctagcgatcctaggatcctttagaatcacatagattgacgattcgtctctcttagtaactctagtaaaataatcatacaatctagtacgcgaaataatattatccttgacttgaggagatctaaacaatctagttttgagaacatcgataagttcatcgggaatgacatacatactatctttaatagaactcttttcatccagttgaatggattcgtccttaaccaactgattaatgagatcttctattttatcattttccagatgatatgtatgtccattaaagttaaattgtgtagcgcttctttttagtctagcagccaatactttaacatcactaatatcgatatacaaaggagatgatttatctatggtattaagaattcgtttttcgacatctgtcaaaaccaattcctttttgcctgtatcatccagttttccatcctttgtaaagaaattattttctactagactattaataagactgataaggattcctccataattgcacaatccaaactttttaacaaaactagactttacaagatctacaggaatgcgtacttcaggtttcttagcttgtgattttttcttttgtggacattttcttgtgaccaactcatctaccatttcattgattttagcagtgaaataagctttcaatgcacgggcactgatactattgaaaacgagttgatcttcaaattccgccatttaagttcaccaaacaacttttaaatacaaatatatcaatagtagtagaataagaactataaaaaaaataataattaaccaataccaaccccaacaaccggtattattagttgatgtgactgttttctcatcacttagaacagatttaacaatttctataaagtctgtcaaatcatcttccggagaccccataaatacaccaaatatagcggcgtacaacttatccatttatacattgaatattggcttttctttatcgctatcttcatcatattcatcatcaatatcaacaagtcccagattacgagccagatcttcttctacattttcagtcattgatacacgttcactatctccagagagtccgataacgttagccaccacttctctatcaatgattagtttcttgagtgcgaatgtaatttttgtttccgttccggatctatagaaaactacaggtgtgataattgccttggccaattgtctttctcttttactgagtgattctagttcaccttctatagatctgagaatggatgattctccagtcgaaacatattctaccatggatccgtttaatttgttgatgaagatggattcatccttaaatgttttctctgtaatagtttccaccgaaagactatgcaaagaatttggaatgcgttccttgtgcttaatgtttccatagacggcttctagaagttgatacaacataggactagccgcggtaacttttatttttagaaagtatccatcgcttctatcttgtttagatttatttttataaagtttagtctctccttccaacataataaaagtggaagtcatttgactagataaactatcagtaagttttatagagatagacgaacaattagcgtattgagaagcatttagtgtaacgtattcgatacattttgcattagatttactaatcgattttgcatactctataacacccgcacaagtctgtagagaatcgctagatgcagtaggtcttggtgaagtttcaactctcttcttgattaccttactcatgattaaacctaaataattgtactttgtaatataatgatatatattttcactttatctcatttgagaataaaaatgtttttgtttaaccactgcatgatgtacagatttcggaatcgcaaaccaccagtggttttattttatccttgtccaatgtgaattgaatgggagcggatgcgggtttcgtacgtagatagtacattcccgtttttagaccgagactccatccgtaaaaatgcatactcgttagtttggaataactcggatctgctatatggatattcatagattgactttgatcgatgaaggctcccctgtctgcagccatttttatgatcgtcttttgtggaatttcccaaatagttttataaactcgcttaatatcttctggaaggtttgtattctgaatggatccaccatctgccataatcctattcttgatctcatcattccataattttctctcggttaaaactctaaggagatgcggattaactacttgaaattctccagacaatactctccgagtgtaaatattactggtatacggttccaccgactcattatttcccaaaatttgagcagttgatgcagtcggcataggtgccaccaataaactatttctaagaccgtatgttctgattttatcttttagaggttcccaattccaaagatccgacggtacaacattccaaagatcatattgtagaataccgttactggcgtacgatcctacatatgtatcgtatggtccttccttctcagctagttcacaactcgcctctaatgcaccgtaataaatggtttcgaagatcttcttatttagatcttgtgcttccaggctatcaaatggataatttaagagaataaacgcgtccgctaatccttgaacaccaataccgataggtctatgtctcttattagagatttcagcttctggaataggataataattaatatctataattttattgagatttctgacaattactttgaccacatccttcagtttgagaaaatcaaatcgcccatctattacaaacatgttcaaggcaacagatgccagattacaaacggctacctcattagcatccgcatattgtattatctcagtgcaaagattactacacttgatagttcctaaattttgttgattactctttttgttacacgcatccttataaagaatgaatggagtaccagtttcaatctgagattctataatcgctttccagacgactcgagcctttattatagatttgtatctcctttctctttcgtatagtgtatacaatcgttcgaactcgtctccccaaacattgtccaatccaggacattcatccggacacatcaacgaccactctccgtcatccttcactcgtttcataaagagatcaggaatccaaagagctataaatagatctctggttctatgttcctcgtttcctgtattctttttaagatcgaggaacgccataatatcagaatgccacggttccaagtatatggccataactccaggccgtttgtttcctccctgatctatgtatctagcggtgttattataaactctcaacattggaataataccgtttgatataccattggtaccggagatatagcttccactggcacgaatattactaattgatagacctattccccctgccattttagagattaatgcgcatcgttttaacgtgtcatagataccctctatgctatcatcgatcatgttaagtagaaaacagctagacatttggtgacgactagttcccgcattaaataaggtaggagaagcgtgcgtaaaccatttttcagaaagtagattgtacgtctcaatagctgagtctatatcccattgatgaattcctactgcgacacgcattaacatgtgctgaggtctttcaacgatcttgttgtttattttcaacaagtaggatttttccaaagttttaaaaccaaaatagttgtatgaaaagtctcgttcgtaaataataaccgagttgagtttatccttatatttgttaactatatccatggtgatacttgaaataatcggagaatgtttcccatttttaggattaacatagttgaataaatcctccatcacttcactaaatagtttttttgtttccttgtgtagatttgatacggctattctggcggctagaatggcataatccggatgttgtgtagtacaagtggctgctatttcggctgccagagtgtccaattctaccgttgttactccattatatattccttgaataaccttcatagctattttaataggatctatatgatccgtgtttaagccataacataattttctaatacgagacgtgattttatcaaacatgacattttccttgtatccatttcgtttaatgacaaacatttttgttggtgtaataaaaaaattatttaacttttcattaatagggatttgacgtatgtagcgtacaaaattatcgttcctggtatatagataaagagtcctatatatttgaaaatcgttacggctcgattaaactttaatgattgcatagtgaatatatcattaggatttaactccttgactatcagggcggcaccagaaattaccatcaaaagcattaatacagttatgccgatcgcagttagaacggttatagcatccaccatttatatctaaaaattagatcaaagaatatgtgacaaagtcctagttgtatactgagaattgacgaaacaatgtttcttacatatttttttcttattagtaactgacttaatagtaggaactggaaagctagacttgattattctataagtatagatacccttccaaataatattctctttgataaaagttccagaaaatgtagaattttttaaaaagttatcttttgctattaccaagattgtgtttagacgcttattattaatatgagtgatgaaatccacaccgcctctagatatcgcttttatttccacattagatggtaaatccaatagtgaaactatctttttaggaatgtatggactcgcgtttagaggagtgaacgtcttaggcgtcggaaaggatgattcatcaaacgaataaacaatttcacaaatggatgttaatgtattagtaggaaattttttgacgctagtggaattgaagattctaatggatgatgttctacctatttcatccgataacatgttaatttccgacaccaacggttttaatatttcgatgatatacggtagtctctctttcggacttatatagcttattccacaatacgagtcattatatactccaaaaaacaaaataactagtataaaatctgtatcgaatgggaaaaacgaaattatcgacataggtatagaatctggaacattgaacgtattaatacttaattctttttctgtggtaagtaccgataggttattgacattgtatggttttaaatattctataacttgagacttgatagatattagtgatgaattgaaaattatttttatcaccacgtgtgtttcaggatcatcgtcgacgcccgtcaaccaaccgaatggagtaaaataaatatcattaatatatgctctagatattagtatttttatcaatcctttgattatcatcttctcgtaggcgaatgattccatgatcaagagtgatttaagaacatcctccggagtattaatgggcttagtaaacagtccatcgttgcaataataaaagttatccaagttaaaggatattatgcattcgtttaaagatatcacctcatctgacggagacaattttttggtaggttttagagactttgaagctacttgtttaacaaagttattcatcgtcgtttactattctatttaattttgtagttaatttatcacatatcacattaattgactttttggtccatttttccatacgtttatattcttttaatcctgcgttatccgtttccgttatatccagggatagatcttgcaagttaaatagaatgctcttaaataatgtcatttttttatccgctaaaaatttaaagaatgtataaacttttttcaaagatttaaaacttttaggtggagttctagtacacaatatcataaacaaactaataaacatcccgcattcagattccaacagctgattaacttccacattaatacagcctattttcgctccaaatgtacattcgaaaaatctgaataaaacatcgatgtcacaatttgtattatccaatacagaatgtctgtgattcgtgttaaaaccatcggagaaggaatagaaataaaaattattatagtggtggaattcagttggaatattgcctccggagtcataaaaggatactaaacattgttttttatcataaattacacatttccaatgagacaaataacaaaatccaaacattacaaatctagaggtagaacttttaattttgtctttaagtatatacgataagatatgtttattcataaacgcgtcaaatttttcatgaatcgctaaggagtttaagaatctcatgtcaaattgtcctatataatccacttcggatccataagcaaactgagagactaagttcttaatacttcgattgctcatccaggctcctctctcaggctctattttcatcttgacgacctttggattttcaccagtatgtattcctttacgtgataaatcatcgattttcaaatccatttgtgagaagtctatcgccttagatactttttcccgtagtcgaggtttaaagaaatacgctaacggtatactagtaggtaactcaaagacatcatatatagaatggtaacgcgtctttaactcgtcggttaactctttcttttgatcgagttcgtcgctactattgggtctgctcaggtgccccgactctactagttccaacatcataccgataggaatacaagacactttgccagcggttgtagatttatcatatttctccactacatatccgttacaatttgttaaaaatttagatacatctatattgctacataatccagctagtgaatatatatgacataataaattggtaaatcctagttctggtattttactaattactaaatctgtatatctttccatttatcatggaaaagaatttaccagatatcttcttttttccaaactgcgttaatgtattctcttacaaatattcacaagatgaattcagtaatatgagtaaaacggaacgtgatagtttctcattggcggtgtttccagttataaaacatagatggcataacgcacacgttgtaaaacataaaggaatatacaaagttagtacagaagcacgtggaaaaaaagtatctcctccatcactaggaaaacccgcacacataaacctaaccgcgaagcaatatatatacagtgaacacacaataagctttgaatgttatagttttctaaaatgtataacaaatacagaaatcaattcgttcgatgagtatatattaagaggactattagaagctggtaatagtttacagatattttccaattccgtaggtaaacgaacagatactataggtgtactagggaataagtatccatttagcaaaattccattggcctcattaactcctaaagcacaacgagagatattttcagcgtggatttctcatagacctgtagttttaactggaggaactggagtgggtaagacgtcacaggtacccaagttattgctttggtttaattatttatttggtggattctctactctagataaaatcactgactttcacgaaagaccagtcattctatctcttcctaggatagctttagttagattgcatagcaataccattttaaaatcattgggatttaaggtactagatggatctcctatttctttacggtacggatctataccggaagaattaataaacaaacaaccaaaaaaatatggaattgtattttctacccataagttatctctaacaaaactatttagttatggcactcttattatagacgaagttcatgagcatgatcaaataggagatattattatagcagtagcgagaaagcatcatacgaaaatagattctatgtttttaatgactgccacgttagaggatgacagggaacggctaaaagtatttttacctaatcccgcatttatacatattcctggagatacactgtttaaaattagcgaggtatttattcataataagataaatccatcttccagaatggcatacatagaagaagaaaagagaaatttagttactgctatacagatgtatactcctcctgatggatcatccggtatagtctttgtggcatccgttgcacagtgtcacgaatataaatcatatttagaaaaaagattaccgtatgatatgtatattattcatggtaaggtcttagatatagacgaaatattagaaaaagtgtattcatcacctaatgtatcgataattatttctactccttatttggaatccagcgttactatacacaatgttacacacatttatgatatgggtagagtttttgtccccgctccttttggaggatcgcaacaatttatttctaaatctatgagagatcaacgaaaaggaagagtaggaagagttaatcctggtacatacgtctatttctatgatctgtcttatatgaagtctatacagcgaatagattcagaatttctacataattatatattgtacgctaataagtttaatctaacactccccgaagatttgtttataatccctacaaatttggatattctatggcgtacaaaggaatatatagactcgttcgatattagtacagaaacatggaataaattattatccaattattatatgaagatgatagagtatgctaaactttatgtactaagtcctattctcgctgaggagttggataactttgagaggacgggagaattaactagtattgtacgagaagccattttatctctaaatttacgaattaagattttaaattttaaacataaagatgatgatacgtatatacacttttgtaaaatattattcggtgtctataacggaacaaacgctactatatattatcatagacctctaacgggatatatgaatatgatttcagatactatatttgttcctgtagataataactaaaaatcaaactctaatgaccacatctttttttagagatgaaaaattttctacatctccttttgtagacacgactaaacattttgcagaaaaaagtttattagtgtttagataatcgtatacttcatcagtgtagatagtaaatgtgaacagataaaaggtattcttgctcaatagattggtaaattccatagaatatattaatcctttcttcttgagatcccacatcatttcaaccagagacgttttatccaatgatttacctcgtactataccacatacaaaactagattttgcagtgacgtcgtacctggtattcctaccaaacaaaattttacttttagttcttttagaaaattctaaggtagaatctctatttgccaatatgtcatctatggaattaccactagcaaaaaatgatagaaatatatattgatacatcgcagctggttttgatctactatactttaaaaacgaatcagattccataattgcctgtatatcatcagctgaaaaactatgttttacacgtattccttcggcatttctttttaatgatatatcttgtttagacaatgataaagttatcatgtccatgagagacgcgtctccgtatcgtataaatatttcattagatgttagacgcttcattaggggtatacttctataaggtttcttaatcagtccatcattggttgcgtcaagaactactatcggatgttgttgggtatctctagtgttacacatggccttactaaagtttgggtaaataactatgatatctctattaattatagatgcatatatttcattcgtcaaggatattagtatcgacttgctatcgtcattaatacgtgtaatgtaatcatataaatcatgcgatagccaaggaaaatttaaatagatgttcatcatataatcgtcgctataattcatattaatacgttgacattgactaatttgtaatatagcctcgccacgaagaaagctctcgtattcagtttcatcgataaaggataccgttaaatataactggttgccgatagtctcatagtctattaagtggtaagtttcgtacaaatacagaatccctaaaatattatctaatgttggattaatctttaccataactgtataaaatggagacggagtcataactattttaccgtttgtacttactggaatagatgaaggaataatctccggacatgctggtaaagacccaaatgtctgtttgaagaaatccaatgttccaggtcctaatctcttaacaaaaattacgatattcgatcccgatatcctttgcattctatttaccagcatatcacgaactatattaagattatctatcatgtctattctcccaccgttatataaatcgcctccgctaagaaacgttagtatatccatacaatggaatacttcatttctaaaatagtattcgttttctaattctttaatgtgaaatcgtatactagaaagggaaaaattatctttgagttttccgttagaaaagaaccacgaaactaatgttctgattgcgtccgattccgttgctgaattaatggatttacaccaaaaactcatataacttctagatgtagaagcattcgctaaaaaattagtagaatcaaaggatataagtagatgttccaacaagtgagcaattcccaagatttcatctatatcattctcgaatccgaaattagaaattcccaagtagatatcctttttcatccgatcgttgatgaaaatacgaactttattcggtaagacaatcatttactaaggagtaaaataggaagtaatgttcgtatgtcgttatcatcgtataaattaaaggtgtgttttttaccattaagtgacattataattttaccaatattggaattataatataggtgtatttgcgcactcgcgacggttgatgcatcggtaaatatagctgtatctaatgttctagtcggtatttcatcatttcgctgtctaataatagcgttttctctatctgtttccattacagctgcctgaagtttattggtcggataatatgtaaaataataagaaatacatacgaataacaaaaataaaataagatataataaagatgccatttagagatctaattttgttcaacttgtccaaattcctacttacagaagatgaggaatcgttggagatagtgtcttccttatgtagaggatttgaaatatcttatgatgacttgataacttactttccagataggaaataccataaatatatttataaagtatttgaacatgtagatttatcggaggaattaagtatggaattccatgatacaactttgcgagatttagtttatcttagattgtacaagtattccaagtgtatacggccgtgttataaattaggagataatctaaaaggcatagttgttataaaggacaggaatatttatattagggaagcaaatgatgacttgatagaatatctcctcaaggaatacactcctcagatttatacatattctaatgagcgcgtccccataactggttcaaaattaattctttgtggattttctcaagttacatttatggcgtatacaacgtcgcatataacaacaaataaaaaggtagatgttctcgtttccaaaaaatgtatagatgaactagtcgatccaataaattatcaaatacttcaaaatttatttgataaaggaagcggaacaataaacaaaatactcaggaagatattttattcggtaaccggtggccaaactccataggtagctttttctatttcggattttagaatttccaaattcaccagcgatttatcggttttggtgaaatccaaggatttattaatgtccacaaatgccatttgttttgtctgtggattgtatttgaaaatggaaacgatgtagttagatagatgcgctgcgaagtttcctattagggttccgcgcttcacgtcacccagcatacttgaatcaccatcctttaaaaaaaatgataagatatcaacatggagtatatcatactcggattttaattcttctactgcatcactgacattttcacaaatactacaatacggtttaccgaaaataatcagtacgttcttcatttatgggtatcaaaaacttaaaatcgttactgctggaaaataaatcactgacgatattagatgataatttatacaaagtatacaatggaatatttgtggatacaatgagtatttatatagccgtcgccaattgtgtcagaaacttagaagagttaactacggtattcataaaatacgtaaacggatgggtaaaaaagggagggcatgtaaccctttttatcgatagaggaagtataaaaattaaacaagacgttagagacaagagacgtaaatattctaaattaaccaaggacagaaaaatgctagaattagaaaagtgtacatccgaaatacaaaatgttaccggatttatggaagaagaaataaaggcaaaaatgcaattaaaaatcgataaacttacatttcaaatatatttatctgattctgataacataaaaatatcattgaatgagatactaacacatttcaacaataatgagaatgttacattattttattgtgatgaacgagacgcagaattcgttatgtgtctcgaggctaaaacacatttctctaccacaggagaatggccgttgataataagtaccgatcaggatactatgctatttgcatctactgataatcatcctaagatgataaaaaacttaactcaactgtttaaatttgttccctcggcagaggataactatttagcaaaattaacggcgttagtgaatggatgtgatttctttcctggactctatggggcatctataacacccaccaacttaaacaaaatacaattgtttagtgattttacaatcgataatatagtcactagtttggcaattaaaaattattatagaaagactaactctaccgtagacgtgcgtaatattgttacgtttataaacgattacgctaatttagacgatgtctactcgtatgttcctccttgtcaatgcactgttcaagaatttatattttccgcattagatgaaaaatggaatgaatttaaatcatcttatttagagaccgttccgttaccctgtcaattaatgtacgcgttagaaccacgtaaggagattgatgtttcagaagttaaaactttatcatcttatatagatttcgaaaatactaaatcagatatcgatgttataaaatctatatcctcgatttttggatattctaacgaaaactgtaacacgatagtattcggcatctataaggataatttactactgagtataaataattcattttactttaacgatagtctgttaataaccaatactaaaagtgataatataataaatataggttactagattaaaaatggtgttccaactcgtgtgctctacatgcggtaaagatatttctcacgaacgatataaattgattatacgaaaaaaatcattaaaggatgtactcgtcagtgtaaagaacgaatgttgtaggttaaaattatctacacaaatagaacctcaacgtaacttaacagtgcaacctctattggatataaactaatatggatccggttaattttatcaagacatatgcgcctagaggttctattatttttattaattataccatgtcattaacaagtcatttgaatccatcgatagaaaaacatgtgggtatttattatggtacgttattatcggaacacttggtagttgaatctacctatagaaaaggagttcgaatagtcccattggatagtttttttgaaggatatcttagtgcaaaagtatacatgttagagaatattcaagttatgaaaatagcagctgatacgtcattaactttattgggtattccgtatggatttggtcatgatagaatgtattgttttaaattggtagctgactgttataaaaatgccggtgttgaaacatcgtctaaacgaatattaggtaaagatatttttctgagccaaaacttcacagacgataatagatggataaagatatatgattctaataatttaacattttggcaaattgattaccttaaagggtgagttaatatgcataactactcctccgttgttttttccctcgttctttttcttaacgttgtttgccatcactctcataatgtaaagatattctaaaatggtaaacttttgcatatcggacgcagaaattggtataaatgttgtaattgtattatttcccgtcaatggactagtcacagctccatcagttttatatcctttagagtatttctcactcgtgtctaacattctagagcattccatgatctgtttatcgttgatattggccggaaagatagattttttattttttattatattactattggcaattgtagatataacttctggtaaatatttttctaccttttcaatctcttctattttcaagccggctatatattctgctatattgttgctagtatcaataccttttcttgctaagaagtcatatgtggtattcactatatcagttttaactggtagttccattagcctttccacttctgcagaataatcagaaattggttctttaccagaaaatccagctactataataggctcaccgatgatcattggcaaaatcctatattgtaccagattaatgagagcatatttcatttccaataattctgctagttcttgagacattgatttatttgatgaatctagttggttctctagatactctaccatttctgccgcatacaataacttgttagataaaatcagggttatcaaagtgtttagcgtggctagaatagtgggcttgcatgtattaaagaatgcggtagtatgagtaaaccgttttaacgaattatatagtctccagaaatctgtggcgttacatacatgagccgaatgacatcgaagattgtccaatatttttaatagctgctctttgtccattatttctatatttgactcgcaacaattgtagataccattaatcactgattcctttttcgatgccggacaatagcacaattgtttagctttggactctatgtattcagaattaatagatatatctcttaatacagattgcactatacattttgaaactatgtcaaaaattgtagaacgacgctgttctgcagccatttaactttaaataatttacaaaaatttaaaatgagcatccgtataaaaatcgataaactgcgccaaattgtggcatatttttcagagttcagtgaagaagtgtctataaatgtagactcgacggatgagttaatgtatatttttgccgccttgggcggatctgtaaacatttgggccattatacctctcagtgcatcagtgttctaccgcggagccgaaaatattgtgtttaatcttccggtgtccaaggtaaaatcgtgtttgtgtagttttcacaatgatgccatcatagatatagaacctgatctggaaaataatctagtaaaactttctagttatcatgtagtaagtgtcgattgtaacaaggaactgatgcctattaggacagatactactatttgtctaagtatagatcaaaagaaatcttacgtgtttaattttcacaagtatgaagaaaaatgttgtggtagaaccgtcattcatttagaatggttgttgggctttatcaagtgtattagtcagcatcagcatttggctattatgtttaaagatgacaatattattatgaagactcctggtaatactgatgcgttttccagggaatattctatgactgaatgttctcaagaactacaaaagttttctttcaaaatagctatctcgtctctcaacaaactacgaggattcaaaaagagagtcaatgtttttgaaactagaatcgtaatggataatgacgataacattctaggaatgttgttttcggatagagttcaatcctttaagatcaacatctttatggcgtttttagattaatactttcaatgagataaatatgggtggcggagtaagtgttgagctccctaaacgggatccgcctccgggagtacccactgatgagatgttattaaacgtggataaaatgcatgacgtgatagctcccgctaagcttttagaatatgtgcatataggaccactagcaaaagataaagaggataaagtaaagaaaagatatccagagtttagattagtcaacacaggacccggtggtctttcggcattgttaagacaatcgtataatggaaccgcacccaattgctgtcgcacttttaatcgtactcattattggaagaaggatggaaagatatcagataagtatgaagagggtgcagtattagaatcgtgttggccagacgttcacgacactggaaaatgcgatgttgatttattcgactggtgtcagggggatacgttcgatagaaacatatgccatcagtggatcggttcagcctttaataggagtgatagaactgtagagggtcaacaatcgttaataaatctgtataataagatgcaaacattatgtagtaaagatgctagtgtaccaatatgtgaatcatttttgcatcatttacgcgcacacaatacagaagatagcaaagagatgatcgattatattctaagacaacagtctgcggactttaaacagaaatatatgagatgtagttatcccactagagataagttagaagagtcattaaaatatgcggaacctcgagaatgttgggatccagagtgttcgaatgccaatgttaatttcttactaacacgtaattataataatttaggactttgcaatattgtacgatgtaatactagcgtgaacaacttacagatggataaaacttcctcattaagattgtcatgtggattaagcaatagtgatagattttctactgttcccgtcaatagagcaaaagtagttcaacataatattaaacattcgttcgacctaaaattgcatttgatcagtttattatctctcttggtaatatggatactaattgtagctatttaaatgggtgccgcggcaagcatacagacgacggtgaatacactcagcgaacgtatctcgtctaaattagaacaagaagcgaacgctagtgctcaaacaaaatgtgatatagaaatcggaaatttttatatccgacaaaaccatggatgtaacctcactgttaaaaatatgtgctctgcggacgcggatgctcagttggatgctgtgttatcagccgctacagaaacatatagtggattaacaccggaacaaaaagcatacgtgccagctatgtttactgctgcgttaaacattcagacaagtgtaaacactgttgttagagattttgaaaattatgtgaaacagacttgtaattctagcgcggtcgtcgataacaaattaaagatacaaaacgtaatcatagatgaatgttacggagccccaggatctccaacaaatttggaatttattaatacaggatctagcaaaggaaattgtgccattaaagcgttgatgcaattgacgactaaggccactactcaaatagcacctagacaagttgctggtacaggagttcagttttatatgattgttatcggtgttataatattggcagcgttgtttatgtactatgccaagcgtatgctgttcacatccaccaatgataaaatcaaacttattttagccaataaggaaaacgtccattggactacttacatggacacattctttagaacttctccgatggttattgctaccacggatatacaaaactgaaaatatattgataatattttaatagattaacatggaagttatcgctgatcgtctagacgatatagtgaaacaaaatatagcggatgaaaaatttgtagattttgttatacacggtctagagcatcaatgtcctgctatacttcgaccattaattaggttgtttattgatatactattatttgttatagtaatttatatttttacggtacgtctagtaagtagaaattatcaaatgttgttggtggcgctagtcatcacattaactattttttattactttatactataatagtactagactgacttctaacaaacatctcacctgccataaataaatgcttgatattaaagtcttctatttctaacactattccatctgtggaaaataatactctgacattatcgctaattgacacatcggtgagtgatatgcctataaagtaataatcttctttgggcacatataccagtgtaccaggttctaacaacctatttactggtgctcctgtagcatactttttctttaccttgagaatatccatcgtttgcttggtcaatagcgatatgtgattttttatcaaccactcgaaaaagtaattggagtgttcatatcctctacgggctattgtctcatggccgtgtatgaaatttaagtaacacgactgtggtagatttgttctatagagccggttgccgcaaatagatagaactaccaatatgtctgtacaaatgttaaacattaattgattaacagaaaaaacaatgttcgttctgggaatagaaaccagatcaaaacaaaattcgttagaatatatgccacgtttatacattgaatataaaataactacagtttgaaaaataacagtatcatttaaacatttaacttgcggggttaatctcacaactttactgtttttaaactgttcaaaatatagcatcgatccatgagaaatacgtttagccgcctttaatagaggaaatcccaccgcctttctggatctcaccaacgacgatagttctgaccagcaactcatttcttcatcatccacctgttttaacatataataggcaggagatagatatccgtcattgcaatattccttctcgtaggcacacaatctaatattgataaaatctccattctcttctctgcatttattatcttgtttcggtggctgattaggctgtagtcttggtttaggctttggtatatcgttgttgaatctattttggtcattaaatctttcatttcttcctggtatatttttatcacctcgtttggttggatttttgtctatattatcgtttgtaacatcggtacgggtattcatttatcacaaaaaaaacttctctaaatgagtctactgctagaaaacctcatcgaagaagataccatattttttgcaggaagtatatctgagtatgatgatttacaaatggttattgccggcgcaaaatccaaatttccaagatctatgctttctatttttaatatagtacctagaacgatgtcaaaatatgagttggagttgattcataacgaaaatatcacaggagcaatgtttaccacaatgtataatataagaaacaatttgggtctaggagatgataaactaactattgaagccattgaaaactatttcttggatcctaacaatgaagttatgcctcttattattaataatacggatatgactgccgtcattcctaaaaaaagtggtaggagaaagaataagaacatggttattttccgtcaaggatcatcacctatcttgtgtattttcgaaactcgtaaaaagattaatatttataaagaaaatatggaatccgcatcgactgagtatacacctatcggagacaacaaggctttgatatctaaatatgcgggaattaatatcctaaatgtgtattctccttccacatccataagattgaatgccatttacggattcaccaataaaaataaactagagaaacttagtactaataaggaactagaatcgtatagttctagccctcttcaagaacccattaggttaaatgattttctgggactattggaatgtgttaaaaagaatattcctctaacagatattccgacaaaggattgattactataaatggagaatgttcctaatgtatactttaatcctgtgtttatagagcccacgtttaaacattctttattaagtgtttataaacacagattaatagttttatttgaagtattcgttgtattcattctaatatatgtattttttagatctgaattaaatatgttcttcatgcctaaacgaaaaatacccgatcctattgatagattacgacgtgctaatctagcgtgtgaagacgataaattaatgatctatggattaccatggatgacaactcaaacatctgcgttatcaataaatagtaaaccgatagtgtataaagattgtgcaaagcttttgcgatcaataaatggatcacaaccagtatctcttaacgatgttcttcgcagatgatgattcattttttaagtatttggctagtcaagatgatgaatcttcattatctgatatattgcaaatcactcaatatctagactttctgttattattattgatccaatcaaaaaataaattagaagccgtgggtcattgttatgaatctctttcagaggaatacagacaattgacaaaattcacagactttcaagattttaaaaaactgtttaacaaggtccctattgttacagatggaagggtcaaacttaataaaggatatttgttcgactttgtgattagtttgatgcgattcaaaaaagaatcctctctagctaccaccgcaatagatcctattagatacatagatcctcgtcgcgatatcgcattttctaacgtgatggatatattaaagtcgaataaagtgaacaataattaattctttattgtcatcatgaacggcggacatattcagttgataatcggccccatgttttcaggtaaaagtacagaattaattagacgagttggtaccaaaaattgaaaaactagcgtctttttttgctcgactgcagaccatggagacacccaagcctaggatactgccctggctcgtgagccagctcgatctcggccaactcgaaggtgtcgcttggttggacgagtcaaggacaagattcagaataccctggaagcatggcctgagacaggatgctcagatggccgattttggtatttttcaagcttgggccgaagcttctggtgcttacacccccggcaaggataaacctgatgtgtccacttggaaacggaatttccggtctgccttgaaccggaaggaagtgttgcgcctcgccgcagataactctaaagatccttacgaccctcacaaagtttatgagtttgttactcccggggcaagagattttgtgcatcttggggcttcacccgatactaatggaaaaagtagtcttccccacagtcaggagaatcttcccaaactttttgatgggcttattctcgggcccttgaaggatgaggggagttccgatttggcaatagtctctgacccaagccagcaactgccatcaccaaacgtcaacaattttctcaatccagccccccaagagaacccccttaaacagcttcttgccgaggagcaatgggagttcgaagttactgccttctatcgcgggaggcaggtattccaacaaaccttgttttgtccaggaggcttgagactcgtgggcagcactgctgatatgactctgccctggcagccagtgaccctccccgaccctgaagggttcctgactgacaaactcgtgaaggagtacgtgggacaagtactgaagggcctgggaaatggtcttgccctctggcaagctggacagtgcttgtgggctcaacgccttggacattcacacgcattttgggccctcggggaggagcttcttcctgacagtggccgcggaccagatggcgaggtacataaggataaagatggtgcagtcttcgacctcagaccatttgtcgcagaccttatcgccttcatggaaggttccggtcacagccctagatatacactttggttctgtatgggggaaatgtggccacaagatcaaccttgggtcaagcgccttgttatggtaaaggtggtccctacatgtttgaaagagctgctcgaaatggctcgggaaggaggagcctcttctttgaaaactgtagacctgcacatatctaacagccaaccaatcagcctgacctccgatcagtacaaagcttaccttcaagaccttgtcgaggacatggacttccaagccacaggcaacatttgattaattaatttttatgagctcggaggtaatgatatgtatcaatcggtgtgtagaaagtgttacatcgactcataatattatattttttatctaaaaaactaaaaataaacattgattaaattttaatataatacttaaaaatggatgttgtgtcgttagataaaccgtttatgtattttgaggaaattgataatgagttagattacgaaccagaaagtgcaaatgaggtcgcaaaaaaactaccgtatcaaggacagttaaaactattactaggagaattattttttcttagtaagttacagcgacacggtatattagatggtgccaccgtagtgtatataggatcggctcctggtacacatatacgttatttgagagatcatttctataatttaggagtgatcatcaaatggatgctaattgacggccgccatcatgatcctattttaaatggattgcgtgatgtgactctagtgactcggttcgttgatgaggaatatctacgatccatcaaaaaacaactgcatccttctaagattattttaatttctgatgtaagatccaaacgaggaggaaatgaacctagtacggcggatttactaagtaattacgctctacaaaatgtcatgattagtattttaaaccccgtggcatctagtcttaaatggagatgcccgtttccagatcaatggatcaaggacttttatatcccacacggtaataaaatgttacaaccttttgctccttcatattcagctgaaatgagattattaagtatttataccggtgagaacatgagactgactcgagttaccaaattagacgctgtaaattatgaaaaaaagatgtactaccttaataagatcgtccgtaacaaagtagttgttaactttgattatcctaatcaggaatatgactattttcacatgtactttatgctgaggaccgtgtactgcaataaaacatttcctactactaaagcaaaggtactatttctacaacaatctatatttcgtttcttaaatattccaacaacatcaactgaaaaagttagtcatgaaccaatacaacgtaaaatatctagcaaaaattctatgtctaaaaacagaaatagcaagagatccgtacgcggtaataaatagaaacgtgctactgagatatactaccgatatagagtataatgatttagttactttaataaccgttagacataaaattgattctatgaaaactgtgtttcaggtatttaacgaatcatccataaattatactccggttgatgatgattatggagaaccaatcattataacatcgtatcttcaaaaaggtcataacaagtttcctgtaaattttctatacatagatgtggtaatatctgacttatttcctagctttgttagactagatactacagaaactaatatagttaatagtgtactacaaacaggcgatggtaaaaagactcttcgtcttcccaaaatgttagagacggaaatagttgtcaagattctctatcgccctaatataccattaaaaattgttagatttttccgcaataacatggtaactggagtagagatagccgatagatctgttatttcagtcgctgattaatcaattagtagagatgagataagaacattataataatcaataatattatcttatatctcgtttagaaaaatgctaatattaaaatagctaacgctagtaatccaatcggaagccatttgatatctataatagggtatctaatttcctgattcagatagcggacagctatattctcggtagctactcgtttggaatcacaaacattatttacatctaatttactatctgtaatggaaacgtttcccaatgaaatggtacaatccgatacattgcattttgttatatttttttttaaagaggctggtaacaacgcatcgcttcgtttacatggctcgtaccaacaataatagggtaatcttgtatctattcctatccgtactatgcttttatcaggataaatacatttacatcgtatatcgtctttgttagcatcacagaatgcataaatttgttcgtccgtcatgataaaaatttaaagtgtaaatataactattatttttatagttgtaataaaaagggaaatttgattgtatactttcggttctttaaaagaaactgacttgataaaaatggctgtaatctctaaggttacgtatagtctatatgatcaaaaagagattaatgctacagatattatcattagtcatgttaaaaatgacgacgatatcggtaccgttaaagatggtagactaggtgctatggatggggcattatgtaaaacttgtgggaaaacggaattggaatgtttcggtcactggggtaaagtaagtatttataaaactcatatagttaagcctgaatttatttcagaaattattcgtttactgaatcatatatgtattcactgcggattattgcgttcacgagaaccgtattccgacgatattaacctaaaagagttatcgggacacgctcttaggagattaaaggataaaatattatccaagaaaaagtcatgttggaacagcgaatgtatgcaaccgtatcaaaaaattactttttcaaagaaaaaggtttgtttcgtcaacaagttggatgatattaacgttcctaattctctcatctatcaaaagttaatttctattcatgaaaagttttggccattattagaaattcatcaatatccagctaacttattttatacagactactttcccatccctccgctgattattagaccggctattagtttttggatagatagtatacccaaagagaccaatgaattaacttacttattaggtatgatcgttaagaattgtaacttgaatgctgatgaacaggttatccagaaggcggtaatagaatacgatgatattaaaattatttctaataacactaccagtatcaatttatcatatattacatccggcaaaaataatatgattagaagttatatcgtcgcccgacgaaaagatcagaccgctagatctgtaattggtcccagtacatctatcaccgttaatgaggtaggaatgcccgcatatattagaaatacacttacagaaaagatatttgttaatgcctttacagtggataaagttaaacaactattagcgtcaaaccaagttaaattttactttaataaacgattaaaccaattaacaagaatacgccaaggaaagtttatcaaaaataaaatacatttattgcctggtgattgggtagaagtagctgttcaagaatatacaagtattatttttggaagacagccgtctctacatagatacaacgtcatcgcttcatctatcagagctaccgaaggagatactatcaaaatatctcccggaattgccaactctcaaaatgctgatttcgacggagatgaagaatggatgatattggagcaaaatcctaaagccgtaattgaacaaagtattcttatgtatccgacgacgttactcaaacacgatattcatggagcccccgtttatggatctattcaagatgaaatcgtagcagcgtattcattgtttaggatacaagatctttgtttagatgaagtattgaacatcttggggaaatatggaagagagttcgatcctaaaggtaaatgtaaattcagcggtaaagatatctatacttacttgataggtgaaaagattaattatccgggtctcttaaaggatggtgaaattattgcaaacgacgtagatagtaattttgttgtggctatgaggcatctgtcattggctggactcttatccgatcataagtcgaacgtggaaggtatcaactttattatcaagtcatcttatgtttttaagagatatctatctatttacggttttggggtgacattcaaagatctgagaccaaattcgacgttcactaataaattggaggccatcaacgtagaaaaaatagaacttatcaaagaagcatacgccaaatatctcaacgatgtaagagacgggaaaatagttccattatctaaagctttagaggcggactatgtggaatccatgttatccaacttgacaaatcttaatatccgagagatagaagaacatatgagacaaacgctgatagatgatccagataataacctcctgaaaatggccaaagcgggttataaagtaaatcctacagaactaatgtatattctaggtacgtatggacaacaaaggattgatggtgaaccagcagagactcgagtattgggtagagtcttaccttactatcttccagactctaaggatccagaaggaagaggttacattcttaattctttaacaaaaggattaacgggttctcaatattacttttcgatgctggttgccagatctcaatctactgatatcgtctgtgaaacatcacgtaccggaacactggctagaaaaatcattaaaaagatggaggatatggtggtcgacggatacggacaagtagttataggtaatacgctcatcaagtacgccgccaattataccaaaattctaggctcagtatgtaaacctgtagatcttatctatccagatgagtccatgacttggtatttggaaattagtgctctgtggaataaaataaaacagggattcgtttactctcagaaacagaaacttgcaaagaagacattggcgccgtttaatttcctagtattcgtcaaacccaccactgaggataatgctattaaggttaaggatctgtacgatatgattcataacgtcattgatgatgtgagagagaaatacttctttacggtatctaatatagattttatggagtatatattcttgacgcatcttaatccttctagaattagaattacaaaagaaacggctatcactatctttgaaaagttctatgaaaaactcaattatactctaggtggtggaactcctattggaattatttctgcacaggtattgtctgagaagtttacacaacaagccctgtccagttttcacactactgaaaaaagtggtgccgtcaaacaaaaacttggtttcaacgagtttaataacttgactaatttgagtaagaataagaccgaaattatcactctggtatccgatgatatctctaaacttcaatctgttaagattaatttcgaatttgtatgtttgggagaattaaatccagacatcactcttcgaaaagaaacagataaatatgtagtagatataatagttaatagattatacatcaagagagcagaaataaccgaattagttgtcgaatatatgattgaacgatttatctcctttagcgtcattgtaaaggaatggggtatggagacattcattgaggacgaggataatattagatttactgtctacctaaatttcgttgaaccggaagaattgaatcttagtaagtttatgatggttcttccgggtgccgccaacaagggcaagattagtaaattcaagattcctatctctgattatacgggttatgacgacttcaatcaaacaaaaaagctcaataagatgactgtagaactcatgaatctaaaagaattgggttctttcgatttggaaaacgtcaacgtgtatcctggagtatggaatacatacgatatcttcggtatcgaggccgctcgtgaatacttgtgcgaagccatgttaaacacctatggagaagggttcgattatctgtatcagccttgtgatcttctcgctagtttactatgtgctagttacgaaccagaatcagttaataaattcaagttcggtgcagctagtactcttaagagagctacgttcggagacaataaagcattgttaaacgcggctcttcataaaaagtcagaacctattaacgataatagtagctgccacttttttagcaaggtccctaatataggaactggatattacaaatactttatcgacttgggtcttctcatgagaatggaaaggaaactatctgataagatatcttctcaaaagatcaaggaaatggaagaaacagaagacttttaattcttatcaataacatatttttctatgatctgtcttttaaacgatggattttccacaaatgcgcctctcaagtccctcatagaatgatacacgtataaaaaatatagcataggcaatgactccttatttttagacattagatatgccaaaatcatagccccgcttctatttactcccgcagcacaatgaaccaacacgggctcgtttcgttgatcacatttagataaaaaggcggttacgtcgtcaaaatatttactaatatcggtagttgtatcatctaccaacggtatatgaataatattaatattagagttaggtaatgtatatttatccatcgtcaaatttaaaacatatttgaacttaacttcagatgatggtgcatccatagcatttttataatttcccaaatacacattattggttacccttgtcattatagtgggagatttggctttgtgcatatctccagttgaacgtagtagtaagtatttatacaaacttttcttatccatttataacgtacaaatggataaaactactttatcggtaaacgcgtgtaatttagaatacgttagagaaaaggctatagtaggcgtacaagcagccaaaacatcaacacttatattctttgttattatattggcaattagtgcgctattactctggtttcagacgtctgataatccagtctttaatgaattaacgagatatatgcgaattaaaaatacggttaacgattggaaatcattaacggatagcaaaacaaaattagaaagtgatagaggtagacttctagccgctggtaaggatgatatattcgacttcaaatgtgtggatttcggcgcctattttatagctatgcgattggataagaaaacatatctgccgcaagctattaggcgaggtactggagacgcgtggatggttaaaaaggcggcaaaggtcgatccatctgctcaacaattttgtcagtatttgataaaacacaagtctaataatgttattacttgtggtaatgagatgttaaatgaattaggttatagcggttattttatgtcaccgcattggtgttccgattttagtaatatggaatagtgttagataaatgcggtaacgaatgttcctgtaaggaaccataacagtttagatttaacgttaaagatgagcataaacataataaacaaaattacaatcaaacctataacattaatatcaaacaatccaaaaaatgaaatcagtggagtagtaaacgcgtacataactcctggataacgtttagcagctgccgttcctattctagaccaaaaattcggtttcatgttttcgaagcggtgttctgcaacaagtcggggatcgtgttctacatatttggcggcgttatccagtatctgcctattgatcttcatttcgttttcgattctggctatttcaaaataaaatcccgatgatagacctccagactttataatttcatctacgatgttcagcgccgtagtaactctaataatataggctgataagctaacatcataccctcctgtatatgtgaatatggcatgatttttgtccattacaagctcggttttaactttattgcctgtaataatttctctcatctgtaggatatctatttttttgtcatgcattgccttcaagacgggacgaagaaacgtaatatcctcaataacgttatcgttttctacaataactacatattctacctttttattttctaactcggtaaaaaaattagaatcccatagggctaaatgtctagcgatatttcttttcgtttcctctgtacacatagtgttacaaaaccctgaaaagaagtgagtatacttgtcatcatttctaatgtttcctccagtccactgtataaacgcataatccttgtaatgatctggatcatccttgactaccacaacatttcttttttctggcataacttcgttgtcctttacatcatcgaacttctgatcattaatatgctcatgaacattaggaaatgtttctgatggaggtctatcaataactggcacaacaataacaggagttttcaccgccgccatttagttattgaaattaatcatatacaactctttaatacgagttatattttcgtctatccattgtttcacatttacatatttcgacaaaaagatataaaatgcgtattccaatgcttctctgtttaatgaattactaaaatatacaaacacgtcactgtctggcaataaatgatatcttagaatattgtaacaatttattttgtattgcacatgttcgtgatctatgagttcttcttcgaatggcataggatctccgaatctgaaaacgtataaataggagttagaataataatatttgagagtattggtaatatataaactctttagcggtataattagtttttttctctcaatttctatttttagatgtgatggaaaaatgactaattttgtagcattagtatcatgaactctaatcaaaatcttaatatcttcgtcacacgttagctctttgaagtttttaagagatgcatcagttggttctacagatggagtaggtgcaacaattttttgttctacacatgtatgtactggagccattgttttaactataatggtgcttgtatcgaaaaactttaatgcagatagcggaagctcttcgccgcgactttctacatcgtaattgggttctaacgccgatctctgaatggatactagttttctaagttctaatgtgattctctgaaaatgtaaatccaattcctccggcattatagatgtgtatacatcggtaaataaaactatagtatccaacgatcccttctcgcaaattctagtcttaaccaaaaaatcgtatataaccacggagatggcgtatttaagagtggattcttctaccgttttgttcttggatgtcatataggaaactataaagtccgcactactgttaagaatgattactaacgcaactatatagttcaaattaagcattttggaaacataaaataactctgtagacgatacttgactttcgaataagtttgcagacaaacgaagaaagaacagacctctcttaatttcagaagaaaactttttttcgtattcctgacgtctagagtttatatcaataagaaagttaagaattagtcggttaatgttgtatttcattacccaagtttgagatttcataatattatcaaaagacatgataatattaaagataaagcgctgactatgaacgaaatagctatatggttcgctcaagaatatagtcttgttaaacgtggaaacgataactgtatttttaatcacgtcagcggcatctaaattaaatataggtatatttattccacacactctacaatatgccacaccatcttcataataaataaattcgttagcaaaattattaattttagtgaaatagttagcgtcaactttcatagcttccttcaatctaatttgatgctcacacggtgcgaattccactctaacatcccttttccatgcctcaggttcatcgatctctataatatctagtttcttgcgtttcacaaacacgggctcgtctctcgcgatgagatctgtatagtaactatgtaaatgataactagatagaaagatgtagctatatagatgacgatcctttaagagaggtataataactttaccccaatcagataaactattgttatggtcttcggaaaaagaatttttataaatttttccagtattttccaaatatacgtacttgacatctaaaaaatccttaatgataataggaatggataatccgtctattttataaagaaatacatatcgcacattatacttttttttggaaatgggaataccgatgtgtctacataaatatgcaaagtctaaatattttttagagaatcttagttggtccaaattcttttccaagtacggtaatagatttttcatattgaacggtatcttcttaatctctggttctagttccgcattaaatgatgaaactaagtcactatttttataactaacgattacatcacctctaacatcatcatttaccagaatactgatcttcttttgtcgtaaatacatgtctaatgtgttaaaaaaaagatcatacaagttatacgtcatttcatctgtggtattcttgtcattgaaggataaactcgtactaatctcttctttaacagcctgttcaaatttatatcctatatacgaaaaaatagcaaccagtgtttgatcatccgcgtcaatattctgttctatcgtagtgtataacaatcgtatatcttcttctgtgatagtcgatacgttataaaggttgataacgaaaatatttttatttcgtgaaataaagtcatcgtaggattttggacttatattcgcgtctagtagatatgcttttatttttggaatgatctcaattagaatagtctctttagagtccatttaaagttacaaacaactaggaaattggtttatgatgtataatttttttagtttttatagattctttattctatacttaaaaaatgaaaataaatacaaaggttcttgagggttgtgttaaattgaaagcgagaaataatcataaattatttcattatcgcgatatccgttaagtttgtatcgtaatggcgtggtcaattacaaataaagcggatactagtagcttcacaaagatggctgaaatcagagctcatctaaaaaatagcgctgaaaataaagataaaaacgaggatattttcccggaagatgtaataattccatctactaagcccaaaaccaaacgagccactactcctcgtaaaccagcggctactaaaagatcaaccaaaaaggaggaagtggaagaagaagtagttatagaggaatatcatcaaacaactgaaaaaaattctccatctcctggagtcagcgacattgtagaaagcgtggccgctgtagagctcgatgatagcgacggggatgatgaacctatggtacaagttgaagctggtaaagtaaatcatagtgctagaagcgatctttctgacctaaaggtggctaccgacaatatcgttaaagatcttaagaaaattattactagaatctctgcagtatcgacggttctagaggatgttcaagcagctggtatctctagacaatttacttctatgactaaagctattacaacactatctgatctagtcaccgagggaaaatctaaagttgttcgtaaaaaagttaaaacttgtaagaagtaaatgcgtgcacttttttataaagatggtaaactctttaccgataataattttttaaatcctgtatcagacgataatccagcgtatgaggttttgcaacatgttaaaattcctactcatttaacagatgtagtagtatatgaacaaacgtgggaggaggcgttaactagattaatttttgtgggaagcgattcaaaaggacgtagacaatacttttacggaaaaatgcatgtacagaatcgcaacgctaaaagagatcgtatttttgttagagtatataacgttatgaaacgaattaattgttttataaacaaaaatataaagaaatcgtccacagattccaattatcagttggcggtttttatgttaatggaaactatgttttttattagatttggtaaaatgaaatatcttaaggagaatgaaacagtagggttattaacactaaaaaataaacacatagaaataagtcccgatgaaatagttatcaagtttgtaggaaaggacaaagtttcacatgaatttgttgttcataagtctaatagactatataagccgctattgaaactgacggatgattctagtcccgaagaatttctgttcaacaaactaagtgaacgaaaggtatacgaatgtatcaaacagtttggtattagaatcaaggatctccgaacgtatggagtcaattatacgtttttatataatttttggacaaatgtaaagtccatatctcctcttccatcaccaaaaaagttaatagcgttaactatcaaacaaactgctgaagtggtaggtcatactccatcaatttcaaaaagagcttacatggcaacgactattttagaaatggtaaaggataaaaattttttagatgtagtatctaaaactacgttcgatgaattcctatctatagtcgtagatcacgttaaatcatctacggatggatgatatagatctttacacaaataattacaagaccgataaatggaaatggataagcgtatgaaatctctcgcaatgacagctttcttcggagagctaaacacattagatattatggcattgataatgtctatatttaaacgccatccaaacaataccattttttcagtggataaggatggtcagtttatgattgatttcgaatacgataattataaggcttctcaatatttggatctgaccctcactccgatatctggagatgaatgcaagactcacgcatcgagtatagccgaacaattggcgtgtgtggatattattaaagaggatattagcgaatatatcaaaactactccccgtcttaaacgatttataaaaaaataccgcaatagatcagatactcgtatcagtcgagatacagaaaagcttaaaatagctctagctaaaggcatagattacgaatatataaaagacgcttgttaataagtaaatgaaaaaaaactagtcgtttataataaaacacaatatggatgccaacatagtatcatcttctactattgcaacgtatatagacgctttagcaaagaatgcttcagaattagaacagaggtctaccgcatacgaaataaataatgaattggaactagtatttattaagccgccattaattactttgacaaatgtagtgaatatctctacgattcaggaatcgtttattcgatttaccgttactaataaggaaggtgtcaaaattagaactaagattccattatctaaggtacatggtctagatgtaaaaaatgtacagttagtagatgctatagataacatagtttgggaaaagaaatcattagtgacggaaaatcgtcttcacaaagaatgcttgttgagactatcgacagaggaacgtcatatatttttggattacaagaaatatggatcctctatccgactagaattagtcaatcttattcaagcaaaaacaaaaaactttacgatagactttaagctaaaatattttctaggatccggtgcccaatctaaaagttctttgttgcacgctattaatcatccaaagtcaaggcctaatacatctctggaaatagaattcacacctagagacaatgaaaaagttccatatgatgaactaataaaggaattgacgactctatcacgtcatatatttatggcttctccagagaatgtaattctttctccgcctattaacgcacctataaagacttttatgttgcctaaacaagatatagtaggtctggatctggaaaatctatatgccgtaactaagactgacggcattcctataactatcagagttacatcaaacgggttgtattgttattttacacatcttgggtatattattagatatccagttaagagaataatagattccgaagtagtagtctttggtgaggcagttaaggataagaactggaccgtatatctcattaagctaatagagcctgtgaatgcaatcaatgatagactagaagaaagtaagtatgttgaatctaaactagtggatatttgtgatcggatagtattcaagtcaaagaaatatgaaggtccgtttactacaactagtgaagtcgtcgatatgttatctacatatttaccaaagcaaccagaaggtgttattctgttctattcaaagggacctaaatctaacattgattttaaaattaaaaaggaaaatactatagaccaaactgcaaatgtagtatttaggtacatgtccagtgaaccaattatctttggagaatcgtctatctttgtagagtataagaaatttagcaacgataaaggctttcctaaagaatatggttctggtaagattgtgttatataacggcgttaattatctaaataatatctattgtttggaatatattaatacacataatgaagtgggtattaagtccgtggttgtacctattaagtttatagcagaattcttagttaatggagaaatacttaaacctagaatcgataaaaccatgaaatatattaactcagaagattattatggaaatcaacataatatcatagtcgaacatttaagagatcaaagcatcaaaataggagatatctttaacgaggataaactatcggatgtgggacatcaatacgccaataatgataaatttagattaaatccagaagttagttattttacgaataaacgaactagaggaccgttgggaattttatcaaactacgtcaagactcttcttatttctatgtattgttccaaaacatttttagacgattccaacaaacgaaaggtattggcgattgattttggaaacggtgctgacctggaaaaatacttttatggagagattgcgttattggtagcgacggatccggatgctgatgctatagctagaggaaatgaaagatacaacaaattaaactctggaattaaaaccaagtactacaaatttgactacattcaggaaactattcgatccgatacatttgtctctagtgtcagagaagtattctattttggaaagtttaatatcatcgactggcagtttgctatccattattcttttcatccgagacattatgctaccgtcatgaataacttatccgaactaactgcttctggaggcaaggtattaatcactaccatggacggagacaaattatcaaaattaacagataaaaagacttttataattcataagaatttacctagtagcgaaaactatatgtctgtagaaaaaatagctgatgatagaatagtggtatataatccatcaacaatgtctactccaatgactgaatacattatcaaaaagaacgatatagtcagagtgtttaacgaatacggatttgttcttgtagataacgttgatttcgctacaattatagaacgaagtaaaaagtttattaatggcgcatctacaatggaagatagaccgtctacaaaaaactttttcgaactaaatagaggagccattaaatgtgaaggtttagatgtcgaagacttacttagttactatgttgtttatgtcttttctaagcggtaaataataatatggtatgggttctgatatccccgttctaaatgcattaaataattccaatagagcgatttttgttcctataggaccttccaactgtggatactctgtattgttaatagatatattaatacttttgtcgggtaacagaggttctacgtcttctaaaaataaaagtttgataacatctggcctgttcataaataaaaacttggcgattctatatatactcttattatcaaatctagccattgtcttatagatgtgagctactgtaggtgtaccatttgattttctttctaatactatatatttctctcgaagaagttcttgcacatcatctgggaataaaatactactgttgagtaaatcagttattttttttatatcgatattgatggacatttttatagttaaggataataagtatcccaaagtcgataacgacgataacgaagtatttatacttttaggaaatcacaatgactttatcagatcaaaattaacaaaattaaaggagcatgtatttttttctgaatatattgtgactccagatacatatggatctttatgcgtcgaattaaatgggtctagttttcagcacggtggtagatatatagaggtggaggaatttatagatgctggaagacaagttagatggtgttctacatccaatcatatatctgaagatatacccgaagatatacacactgataaatttgtcatttatgatatatacacttttgacgctttcaagaataaacgattggtattcgtacaggtacctccgtcgttaggagatgatagctatttgactaatccgttattgtctccgtattatcgtaattcagtagccagacaaatggtcaatgatatgatttttaatcaagattcatttttaaaatatttattagaacatctgattagaagccactatagagtttctaaacatataacaatagttagatacaaggataccgaagaattaaatctaacgagaatatgttataatagagataagtttaaggcgtttgtattcgcttggtttaacggcgtttcggaaaatgaaaaggtactagatacgtataaaaaggtatctaatttgatataatgaattcagtgactgtatcacacgcgccatatactattacttatcacgatgattgggaaccagtaatgagtcaattggtagagttttataacgaagtagccagttggctgctacgagacgagacgtcgcctattcctgataagttctttatacagttgaaacaaccgcttagaaataaacgagtatgtgtgtgcggtatagatccgtatccgaaagatggaactggtgtaccgttcgaatcaccaaattttacaaaaaaatcaattaaggagatagcttcatctatatctagattaaccggagtaattgattataaaggttataaccttaatataatagacggggttataccctggaattattacttaagttgtaaattaggagaaacaaaaagtcacgcgatctactgggataagatttccaagttactgctgcagcatataactaaacacgttagtgttctttattgtttgggtaaaacagatttctcgaatatacgggcaaagttagaatccccggtaactaccatagtgggatatcatccagcggctagagaccgtcaattcgagaaagatcgatcatttgaaattatcaacgttttactggaattagacaacaaggtacctataaattgggctcaagggtttatttattaatgctttagtgaaattttaacttgtgttctaaatggatgcggctattagaggtaatgatgttatctttgttcttaagactataggtgtcccgtcagcgtgcagacaaaatgaagatccaagatttgtagaagcatttaaatgcgacgagttagaaagatatattgagaataatccagaatgtacactattcgaaagtcttagggatgaggaagcatactctatagtcagaattttcatggatgtagatttagacgcgtgtctagacgaaatagattatttaacggctattcaagattttattatcgaggtgtcaaactgtgtagctagattcgcgtttacagaatgcggcgccattcatgaaaatgtaataaaatccatgagatctaatttttcattgactaagtctacaaatagagataaaacaagttttcatattatctttttagacacgtataccactatggatacattgatagctatgaaacgaacactattagaattaagtagatcatctgaaaatccactaacaagatcgatagacactgccgtatataggagaaaaacaactcttcgggttgtaggtactaggaaaaatccaaattgcgacactattcatgtaatgcaaccacctcatgataatatagaagattacctattcacttacgtggatatgaacaacaatagttattacttttctctacaacgacgattggaggatttagttcctgataagttatgggaaccagggtttatttcattcgaagacgctataaaaagagtttcaaaaatattcattaattctataataaactttaatgatctcgatgaaaataattttacaacggtaccactggtcatagattacgtaacaccttgtgcattatgtaaaaaacgatcgcataaacatccgcatcaactatcgttggaaaatggtgctattagaatttacaaaactggtaatccacatagttgtaaagttaaaattgttccgttggatggtaataaactgtttaatattgcacaaagaattttagacactaactctgttttattaaccgaacgaggagaccatatagtttggattaataattcatggaaatttaacagcgaagaacccttgataacaaaactaattttgtcaataagacatcaactacctaaggaatattcaagcgaattactctgtccaagaaaacgaaagactgtagaagctaacatacgagacatgttagtagattcagtggagaccgatacctatccggataaacttccgtttaaaaatggtgtattggacctggtagacggaatgttttactctggagatgatgctaaaaaatatatgtgtactgtatcaaccggatttaaatttgacgatacaaagttcgtcgaagacagtccagaaatggaagagttaatgaatatcattaacgatatccaaccattaacggatgaaaataagaaaaatagagagctatatgaaaaaacattatctagttgtttatgcggtgctaccaaaggatgtttaacattcttttttggagaaactgcaactggaaagtcgacaaccaaacgtttgttaaagtctgctatcggtgacctgtttgttgagacgggtcaaacaattttaacagatgtattggataaaggacctaatccatttatcgctaacatgcatttgaaaagatctgtattctgtagcgaactacctgattttgcatgtagtgggtcaaagaaaatcagatctgataatattaaaaagttgacagaaccttgtgtcattggaagaccgtgtttctccaataaaattaataatagaaaccatgcgacaatcattatcgatactaattacaaacctgtttttgataggatagataacgcattaatgagaagaattgccgtcgtgcgattcagaacacacttttctcaaccttctggtagagaggctgctgaaaataatgacgcgtacgataaagtcaaactattagacgaggggttagatggtaaaatacaaaataatagatatagattcgcatttctatacttgttggtgaaatggtacagaaaatatcatgttcctattatgaaactatatcctacacccgaagagattcctgactttgcattctatctcaaaataggtactctgttggtatctagctctgtaaagcatattccattaatgacggacctctccaaaaagggatatatattgtacgataatgtggtcactcttccgttgactactttccaacagaaaatatccaagtattttaattctagactatttggacacgatatagagagcttcatcaatagacataagaaatttgccaatgttagtgatgaatatctgcaatatatattcatagaggatatttcatctccgtaaatatatgctcatatatttatagaagatatcacatatctaaatgaataccggaattatagatttatttgataatcatgttgatagtataccaactatattacctcatcagttagctactctagattatctagttagaactatcatagatgagaacagaagcgtgttattgttccatattatgggatcaggtaaaacaataatcgctttgttgttcgccttggtagcttccagatttaaaaaggtttacattctagtgccgaacatcaacatcttaaaaattttcaattataatatgggtgtagctatgaacttgtttaatgacgaattcatagctgagaatatctttattcattccacaacaagtttttattctcttaattataacgataacgtcattaattataacggattatctcgctacaataactctatttttatcgttgatgaggcacataatatctttgggaataatactggagaacttatgaccgtgataaaaaataaaaacaagattccttttctactattgtctggatctcccattactaacacacctaatactctgggtcatattatagatttaatgtccgaagagacgatagattttggtgaaattattagtcgtggtaagaaagtaattcagacacttcttaacgaacgcggtgtgaatgtacttaaggatttgcttaaaggaagaatatcatattacgaaatgcctgataaagatctaccaacgataagatatcacggacgtaagtttctagatactagagtagtatattgtcacatgtctaaacttcaagagagagattatatgattactagacgacagctatgttatcatgaaatgtttgataaaaatatgtataacgtgtcaatggcagtattgggacaacttaatctgatgaataatttagatactttatttcaggaacaggataaggaattgtacccaaatctgaaaataaataatggcgtgttatacggagaagaattggtaacgttaaacattagttccaaatttaaatactttattaatcggatacagacactcaacggaaaacattttatatacttttctaattctacatatggcggattggtaattaaatatatcatgctcagtaatggatattctgaatataatggttctcagggaactaatccacatatgataaacggcaaaccaaaaacatttgctatcgttactagtaaaatgaaatcgtctttagaggatctattagatgtgtataattctcctgaaaacgatgatggtagtcaattgatgtttttgttttcatcaaacattatgtccgaatcctatactctaaaagaggtaaggcatatttggtttatgactatcccagatactttttctcaatacaaccaaattcttggacgatctattagaaaattctcttacgccgatatttctgaaccagttaatgtatatcttttagccgccgtatattccgatttcaatgacgaagtgacgtcattaaacgattacacacaggatgaattaattaatgttttaccatttgacatcaaaaagctgttatatctaaaatttaagacgaaagaaacgaatagaatatactctattcttcaagagatgtctgaaacgtattctcttccaccacatccatcaattgtaaaagttttattgggagaattggtcagacaatttttttataataattctcgtattaagtataacgataccaagttacttaaaatggttacatcagttataaaaaataaagaagacgctaggaattacatagatgatattgtaaacggtcacttctttgtatcgaataaagtatttgataaatctcttttatacaaatacgaaaacgatattattacagtaccgtttagactttcctacgaaccatttgtttggggagttaactttcgtaaagaatataacgtggtatcttctccataaaactgatgagatatataaagaaataaatgtcgagctttgttaccaatggataccttccagttacattggagccacacgagctgacgttagacataaaaactaatattaggaatgccgtatataagacgtatctccatagagaaattagtggtaaaatggccaagaaaatagaaattcgtgaagacgtggaattacctctcggcgaaatagttaataattctgtagttataaacgttccgtgtgtaataacctacgcgtattatcacgttggggatatagttagaggaacattaaacatcgaagatgaatcaaatgtaactattcaatgtggagatttaatctgtaaactaagtagagattcgggtactgtatcatttagcgattcaaagtactgcttttttcgaaatggtaatgcgtatgacaatggcagcgaagtcactgccgttctaatggaggctcaacaaggtatcgaatctagttttgtttttctcgcgaatatcgtcgactcataagaaagagaatagcggtaagtataaacacgaatactatggcaataattgcgaatgttttattcccttcgatatatttttgataatatgaaaaacatgtctctctcaaatcggacaaccatctcataaaatagttatctcgcgctggcgaggtggttgccgctcgtataatctccccagaataatatacttgcgtgtcgtcgttcaatttatacggatttctatagttctctgttatataatgcggttttccatcatgattagacgacgacaatagtgttctaaatttagatagttgatcagaatgaatgtttattggcgttggaaaaattatccatgctgcgtctgcagagtggttgatagttgttcctagatatgtaaaataatccaacgtactaggtagcaaattgtctagataaaatactgaatcaaacggcgcagacgtattagcggatctaatggaatccaattgattgactatcttttgaaaatatacatttttatgatccgatacttgtaagaatatagaaataatgataagtccatcatcgtgtttttttgcctcttcataagaactatattttttcttattccaatgaacaagattaatctctccagagtatttgtacacatctatcaagtgattggatccataatcgtcttcctttccccaatatatatgtagtgatgataacacatattcattggggagaaaccctccacttatatatcctcctttaaaattaatccttactagttttccagtgttctggatagtggttggtttcgactcattataatgtatgtctaacggcttcaatcgcgcgttagaaattgcttttttagtttctatattaataggagatagttgttgcggcatagtaaaaatgaaatgataactgtttaaaaatagctcttagtatgggaattacaatggatgaggaagtgatatttgaaactcctagagaattaatatctattaaacgaataaaagatattccaagatcaaaagacacgcatgtgtttgctgcgtgtataacaagtgacggatatccgttaataggagctagaagaacttcattcgcgttccaggcgatattatctcaacaaaattcagattctatctttagagtatccactaaactattacggtttatgtactacaatgaactaagagaaatctttagacggttgagaaaaggttctatcaacaatatcgatcctcactttgaagagttaatattattgggtggtaaactagataaaaaggaatctattaaagattgtttaagaagagaattaaaagaggaaagtgatgaacgtataacagtaaaagaatttggaaatgtaattctaaaacttacaacacgggataaattatttaataaagtatatataggttattgcatggcgtgttttattaatcaatcgttggaggatttatcgcatactagtatttacaatgtagaaattagaaagattaaatcattaaatgattgtattaacgacgataaatacgaatatctgtcttatatttataatatgctagttaatagtaaatgaacttttacagatctagtataattagtcagattattaagtataatagacgactagctaagtctattatttgcaaggatgactctcaaattattacactcacggcattcgttaaccaatgcctatggtgtcataaacgagtatccgtgtccgctattttattaactactgataacaaaatattagtatgtaacagacgagatagttttctctattctgaaataattagaactagaaacatgtttagaaagaaacgattatttctgaattattccaattatttgtccaaacaggaaagaagtatactatcgtcatttttttctctatatccagctactgctgataatgatagaatagacgctatttatccgggtggcatacccaaaaggggtgagaatgttccagagtgtctatccagggaaatcaaagaagaagttaatatagacaattcttttgtattcatagacactcggttttttattcatggtatcatagaagataccattatcaacaaattttttgaggtaattttctttgtcggaagaatatctctaacgagtgatcaaattattgatacctttaaaagtaatcatgaaatcaaggatctaatatttttagatccgaattcaggtaatggactccaatacgaaattgcaaaatatgctctagatactgcaaaacttaaatgttacggccatagaggatgttattatgaatcattaaaaaaattaactgaggatgattgattagaaaatataaattaatttaccatcgtgtatttttataacgggattgtccggcatatcatgtagatagttaccgtctacatcgtatactcgaccatctacgcctttaaatcctctatttattgacattaatctattagaattggaataccaaatattagtaccctcaattagtttattggtaatattttttttagacgatagatcgatggctcttgaaaccaaggttttccaaccggactcattgtcgatcggtgagaagtctttttcattagcatgaatccattctaatgatgtatgtttaaacactctaaacaattggacaaattcttttgatttgctttgaatgatttcaaataggtcttcgtctacagtaggcataccattagataatctagccattataaagtgcacgtttacatatctacgttctggaggagtaagaacgtgactattgagacgaatggctcttcctactatctgacgaagagacgcctcgttccatgtcatatctaaaatgaagatatcattaattgagaaaaaactaataccctcgcctccactagaagagaatacgcatgttttaatgcattctccgttagtgtttgattcttggttaaactcagccaccgccttgattctagtatcttttgttctagatgagaactctatattagagataccaaagactttgaaatatagtaataagatttctattcctgactgattaacaaatggttcaaagactagacatttaccatgggatgctaatattcccaaacatacatctataaatttgacgcttttctcttttaattcagtaaatagagagatatcagccgcactagcatcccctttcaatagttctccctttttaaaggtatttaatgcggatttagaaaactctctatctcttaatgaatttttaaaatcattatatagtgttgctatctcttgcgcgtattcgccgggatcacgattttgtctttcaggaaagctatcgaacgtaaacgtagtagccatacgtctcagaattctaaatgatgatataccagtttttatttctgcgagtttagccttttgataaatctcttcttgcttttttgacatattaacgtatcgcattaatactgttttcttagcgaatgatgcagacccttctacgttatcaaaaatagaaaactcgttattaactatgtacgaacataggcctcctagtttggagactaattctttttcatcgactagacgtttattctcaaatagtgattggtgttgtaaggatcctggtcgtagtaagttaaccaacatggtgaattcttgcacactattgacgataggtgtagccgataaacaaatcatcttatggttttttaatgcgatggtcttggataaaaaattatatactgaacgagtaggacggatcttaccatcttctttgattaatgatttagaaatgaagttatgacattcatcaataatgacgcatattctactcttggaattaatagttttgatattagtaaaaaatttatttctaaaattttgatcatcgtaattaataaaaatacaatccttcgttatctctggagcgtatctgagtatagtgttcatccaaggatcttctatcaaagcctttttcaccaataagataatagcccaattcgtataaatatccttaagatgtttgagaatatatacagtagtcattgttttaccgacacccgtttcatggaacaataaaagagaatgcatactgtctaatcctaagaaaactcttgctacaaaatgttgataatccttgaggcgtactacgtccgaccccatcatttcaacgggcatattagtagttctgcgtaaggcataatcgatataggccgcgtgtgatttactcatttatgagtgataagtaataactatgttttaaaaatcacagcagtagtttaactagtcttctctgatgtttgttttcgatactttttgaatcagaagtcatactagaataaagcaacgagtgaacgtaatagagagcttcgtatactctattcgaaaactctaagaacttattaatgaattccgtatccactggattgtttaaaatactaaattgaacactgttcacatccttccaagaagaagacttagtgacggacttaacatgagacataaataaatccaaattttttttacaaacatcactagccaccataatggcgctatctttcaaccagctatcgcttacgcattttagcagtctaacatttttaaagagactacaatatattctcatagtatcgattacacctctaccgaataaagttggaagtttaataatacaatatttttcgtttacaaaatcaaataatggtcgaaacacgtcgaaggttaacatcttataatcgctaatgtatagattgttttcagtgagatgattattagatttaatagcatctcgttcacgtttgaacagtttattgcgtgcgctgaggtcggcaactacggcgtccgctttagtactcctcccataatactttacgctattaatctttaaaatttcatagactttatctagatcgctttctggtaacatgatatcatgtgtaaaaagttttaacatgtcggtcggcattctatttagatcattaactctagaaatctgaagaaagtaattagctccgtattccagactaggtaatgggcttttacctagagacagattaagttctggcaatgtttcataaaatggaagaaggacatgcgttccctcccggatattttttacaatttcatccatttacaactctatagtttgttttcattattattagttattatctcccataatcttggtaatacttaccccttgatcgtaagataccttatacaggtcattacatacaactaccaattgtttttgtacataatagattggatggttgacatccatggtggaataaactactcgaacagatagtttatctttccccctagatacattggccgtaatagttgtcggcctaaagaatatctttggtgtaaagttaaaagttagggttcttgttccattattgctttttgtcagtagttcattataaattctcgagatgggtccgttctctgaatatagaacatcatttccaaatctaacttctagtctagaaataatatcggtcttattcttaaaatctattcccttgatgaagggatcgttaatgaacaaatccttggcctttgattcggctgatctattatctccgttatagacgttacgttgactagtccaaagacttacaggaatagatgtatcgatgatgttgatactatgtgatatgtgagcaaagattgttctcttagtggcatcactatatgttccagtaatggcggaaaactttttagaaatgttatatataaaagaattttttcgtgttccaaacattagcagattagtatgaagataaacactcatattatcaggaacattatcaatttttacatacacatcagcatcttgaatagaaacgataccatcttctggaacctcaacaatctcggcagactccggataaccagtcggtggaccatcgctaacaataactagatcatccaacaatctactcacatatgcatctatataatctttttcatcttgtgagtaccctggatacgaaataaatttattatccgtatttccataataaggtttagtataaacagagagcgatgttgccgcatgaacttcagttacagtcgccgttggttggtttatttgacctattactctcctaggtttctctataaacgatggtttaatttgtacattcttaaccatatatccaataaagctcaattcaggaacataaacaaattctttgttgaacgtttcaaagtcgaacgaagagtcacgaataacgatatcggatactggattgaaggttaccgttacggtaatttttgaatcggatagtttaagactgctgaatgtatcttccacatcaaacggagttttaatataaacgtatactgtagatggttctttaatagtgtcattaggagttaggccaatagaaatatcattaagttcactagaatatccagagtgtttcaaagcaattgtattattgatacaattattatataattcttcgccctcaatttcccaaataacaccgttacacgaagagatagatacgtgattaatacatttatatccaacatatggtacgtaaccgaatcttcccatacctttaacttctggaagttccaaactcagaaccaaatgattaagcgcagtaatatactgatccctaatttcgaagctagcgatagcctgattgtctggaccatcgtttgtcataactccggatagagaaatatattgcggcatatataaagttggaatttgactatcgactgcgaagacattagaccgtttaatagagtcatccccaccgatcaaagaattaatgatagtattattcattttctatttaaaatggaaaaagcttacaataaactccgtagagaaatatctataatttgtgagttttccttaaagtaacagcttccgtaaacgccgtctttatctcttagtaagtttattgtatttataaccttttccttatcttcatagaatactaaaggcaacaaagaaatttttggttcttctctaagagctacgtgagacttaaccatagaagccaacgaatccctacatattttagaacagaaataccctacttcaccacccttgtatgtctcaatactaataggtctaaaaaccaaatcttgattacaaaaccaacacttatcaattacactatttgtcttaatagacacatctgccatagatttataatactttggtagtatacaagcgagtgcttcttctttagcgggcttaaagactgctttaggtgctgaaataaccacatctggaaggcttactcgcttagccatttaattacggaactatttttttatacttctaatgagcaagtagaaaacctctcatctacaaaaacatactcgtgtccataatcctctaccatagttacacgttttttagatctcatatgtgctaaaaagttttcccatactaattggttactattatttttcgtataatttttaacagtttgaggttttagatttttagttacagaagtgatatcgaatattttatccaaaaagaatgaataattaattgtcttagaaggagtgttttcttggcaaaagaataccaagtgcttaaatatttctactacttcattaatcttttctgtactcagattcagtttctcatcttttacttgattgattatttcaaagactaacttataatcctttttatttattctctcgttagccttaagaaaactagatacaaaatttgcatctacatcatccgtggatatttgatttttttccatgatatccaagagttccgagataatttctccagaacattgatgagacaataatctccgcaatacatttctcaaatgaataagtttattagacacgtggaagtttgactttttttgtacctttgtacatttttgaaataccgactcgcaaaaaatacaatattcatatccttgttcagatactataccgttgtgtctacaaccgctacataatcgtagattcatgttaacactctacgtatctcgtcgtccaatattttatataaaaacattttatttctagacgttgccagaaaatcctgtaatacttttagttttttgggctgtgaataaagtatcgccctaatatggttaccgtcctccgccaatatagtagttaaattatccgcacatgcaaaagaacaccgcttaggcggattcagtacaatgttatatttttcgtaccaactcatttaaatatcataatctaaaatagttctgtaatatgtctagcgctaatatattgatcataatcctgtgcataaattaagatacaacaatgtctcgaaatcatcgacatggcttcttccatagttagaagatcgtcgtcaaagttagcaacgtgattcatcaacatttgctgttttgaggcagcaaatactgaaccgtcgccattcaaccattcataaaaaccatcgtctgaatccattgataatttcttgtactggtttttgagagctcgcatcaatctagcatttctagctcccggattgaaaacagaaagaggatcgtacatccagggtccattttctgtaaatagaatcgtataatgtcccttcaagaagatatcagacgatccacaatcaaagaattggtctccgagtttgtaacaaactgcggactttaacctatacatgataccgtttagcataatttctggtgatacgtcaatcggagtatcatctattagagatctaaagccggtgtaacattctccaccaaacatattcttattctgacgtcgttctacataaaacatcattgctccattaacgataacaggggaatgaacagcactacccatcacattagttcccaatggatcaatgtgtgtaactccagaacatcttccatagcctatgttaggaggagcgaacaccactcttccactattgccatcgaatgccatagaataaatatccttggaattgatagaaatcggactgtcggatgttgtgatcatcttcataggattaacaacgatgtatggtgccgcctgaagtttcatatcgtaactgatgccgttcataggtctagccacagaaaccaacgtaggtctaaatccaactatagacaaaatagaagccaatatctgttcctcatctgtcataacttgagagcatccagtatgaataatcttcattagatggggatctaccgcatcatcatcgttacaataaaaaattcccattctaatgttcataattgcttttctaatcatggtatgcatgtttgctctctgaatctctgtggaaattagatctgatacacctgtaatcactatcggattatcctccgtaagacgattaaccaacaacatataattataagactttacttttctaaattcataaagttgctggattaggctataggtgtctccatgtacatacgcgttctcgagcgcaggaagtttaataccgaatagtgccatcagaataggatgaatatagtaattagtttctggttttctataaataaaagacaaatcttgtgaactagacatatcggtaaaatgcatggattggaatcgtgtagtcgacagaagaatatgatgattagatggagagtatattttatctaactctttgagttggtcaccgattctaggactagctcgagaatgaataagtactaaaggatgagtacatttcacagaaacactagcattgttcaatgtgctctttacatgggtaaggagttgaaatagctcgtttctatttgttctgacaatatttagtttattcataatgttaagcatatcctgaatagtaaagttagatgtgtcatacttgttagtagttagatatttagcaattgcattcccatcatttctcaatctcgtactccaatcatgcgtggatgctacttcgtcgatggaaaccatacaatcctttttgataggctgttgagattgattatttcctgcacgtttaggtttggtacgttgatttctagcccctgcggatataaagtcatcgtctacaatttgggacaatgaattgcatacactacaagacaaagatttatcagaagtgtgaatatgatcttcatctaccaaagaaagagtttgattagtataactagattttagtcctgcgttagatgttaaaaaaacatcgctattgaccacggcttccattatttatattcgtagtttttactcgaaagcgtgattttaatatccaatcttattacttttggaatcgttcaaaacctttgactagttgtagaatttgatctattgccctacgcgtatactcccttgcatcatatacgttcgtcaccagatcgtttgtttcggcctgaagttggtgcatatctttttcaacactcgacatgagatccttaagggccatatcgtctagattttgttgagatgctgctcctggatttggattttgttgtgctgttgtacatactgtaccaccagtaggtgtaggagtacatacagtggccacaataggaggttgaggaggtgtaaccgttggagtagtacaagaaatatttccatccgattgttgtgtacatgtagttgttggtaacgtctgagaaggttgggtagatggcggtgtcgtcgtcttttgatctttattaaatttagagataatatcctgaacagcattgctcggcgtcaacgctggaaggagtgaactcgccggcgcatcagtatctgcagacagccaatcaaaaagattagacatatcagatgatgtattagtttgttgtcgtggttttggtgtaggagcagtactactaggtagaagaataggagccgatgtaggtgtcggaaccggctgtggagttatatgaatagttggttgtagcggttggataggctgtctgctggcggccatcatattatctctagctagttgttctcgcaactgtctttgataatacgactcttgagactttagtcctatttcaatcgcttcatcctttttcgtatccggatccttttcttcagaataatagattgacgactttggtgtagaggattctgccagcccctgtgagaacttgttaaagaagtccatttaaggctttaaaattgaattgcgattataagattaaatggcagacacagacgatattatcgactatgaatccgatgatctcactgaatacgaggatgatgaagaagaggaagaagatggagagtcactagaaactagtgatatagatcccaaatcttcttataagattgtagaatcagcatccactcatatagaagatgcgcattccaatcttaaacatatagggaatcatatatctgctcttaaacgacgctatactagacgtataagtctatttgaaatagcgggtataatagcagaaagctataacttgcttcaacgaggaagattacctctagtttcagaattttctgacgaaacgatgaagcaaaatatgctacatgtaattatacaagagatagaggagggttcttgtcctatagtcatcgaaaagaacggagaattgttgtcggtaaacgattttgacaaagatggtctaaaattccatctagactatattatcaaaatttggaaacttcaaaaacgatattagaatttatacgaatatcgttctctaaatgtcacaatcaagtctcgcatgttcagcaatttattgtcgtactttatatcgtgttcattaacgatatcttgcaaaatagtaatgattctatcttccttcgatagatattcttcagagattattgtcttatattctttcttgttatcagatatgaatttgataagactttgaacattattgatacccgtctgtttaattttttctacagatattttagttttggcagattctatcgtatctgtcaatagacatccaacatcgacattcgacgtcaattgtctataaatcaacgtataaattttagaaataacattagcgaattgttgtgcattgatgtcgttattctgaaacagtatgattttaggtagcattttcttaacaaagagaacgtatttattgttactcagttgaacagatgatatatccagattactaacgcatctgattccgtataccaaactttcagaagaaatggtatacaattgtttgtattcattcaatgtctctttttcagaaattagtttagagtcgaatactgcaataattttcaagagatagttttcatcagataagattttatttagtgtagatatgataaaactattgttttgttggagaacttgatacgccgcgttctctgtagtcgacgctctcaaatgggaaacgatctccattatttttttggaatcggatactatatcttcggtatcttgacgcagtctagtatacatagagttaagagagattagagtttgtacattaagcaacatgtctctaaatgtggctacaaacttttccttttccacatcatctagtttattatataccgatttcacaacggcaccagatttaaggaaccagaatgaaaaactctgataactacaatatttcatcatagttacgattttatcatcttctatagttggtgtaatagcgcatacctttttctccaagactggaaccaacgtcataaaaatgtttaaatcaaaatccatatcaacatctgatgcgctaagaccagtctcgcgttcaagattatctttactaatggtgacgaactcatcgtatagaactctaagtttgtccattatttatttacagatttagttgtttaatttatttgtgctcttccagagttgggatagtatttttctaacgtcggtattatattattaggatctacgttcatatgtatcataatattaatcatccacgttttgataaatctatctttagcttctgaaataacgtatttaaacaaaggagaaaaatatttagctacggcatcagacgcaataacattttttgtaaatgtaacgtatttagacgacagatcttcgttaaaaagttttccatctatgtagaatccatcagttgttaacaccattcccgcgtcagattgaataggagtttgaatagtttgttttggaaatagatccttcaataacttatagttgggtgggaaaaaatcgattttatcactagactctttcttttttactatcattacctcatgaactatttcttgaatgagtatatgtattttctttcctatatcggacgcgttcattggaaaatataccatgtcgttaactataagaatatttttatcctcgtttacaaactgaataatatcagatgtagttcgtaaacgaactatatcatcaccagcacaacatctaactatatgatatccactagtttcctttagtcgtttattatcttgttccatattagcagtcattccatcatttaagaaggcgtcaaagataatagggagaaatgacattttggattctgttacaactttaccaaaattaaggatatacggacttactatctttttctcaacgtcaatttgatgaacacacgatgaaaatgtacttcgatgagattgatcatgtagaaaacaacaagggatacaatatttccgcatatcatgaaatatattaagaaatcccaccttattatatttccccaaaggatccatgcacgtaaacattatgccgttatcattaataaagacttctttctcatcggatctgtaaaagttgttactgatttttttcattccaggatctagataattaataatgatgggttttctattcttattctttgtattttggcatatcctagaccagtaaacagtttccactttggtaaaatcagcagacttttgaacgctattaaacatggcattaatggcaataactaaaaatgtaaaatatttttctatgttaggaatatggtttttcactttaatagatatatggtttttggccaaaatgatagatatttttttatccgaggatagtaaaatattattagtcgccgtctctataaaaatgaagctagtctcgatatccaattttattctagaattgataggagtcgccaaatgtaccttatacgttatatctcccttgatgcgttccatttgtgtatctatatcggacacaagatctgtaaatagttttacgttattaatcatcacggtatcgccgtcgctagataatgctaatgtaccatccaagtcccaaatggagagatttaactgttcatcgtttagaataaaatgattaccggtcatattaataaagtgttcatcgtatctagataacaacgacttataattaatgtccaagtcttgaactcgctgaatgatcttttttaacccagttagttttagattggtacgaaatatattgttaaactttgattctacagtaatgtccaaatctagttgtggaaatacttccatcaacattgtttcaaacttgataatattattatctacatcttcatacgatccaaattccggaatagatgtatcacatgctcttgccacccagataaccaaaaagtcacacgctccaggatatacattgtataaaaagctatcgtttttaagtagggtttttttctgcgtgtatacgaagggattaaaaatagtattatcaacgtaactatattccaaattattcttatgagaatagataataatatcgtccttaatatctaacaaatttcctaaatatccctttaattgagtcattcgaagcgtcaatagaatatgtctcttaactatttccggctgttgtatatttaaatgacttcgtaaaaaataatatatgggcgacttctcatctatgtaatcatatggagtgagatatagggctcgttctacctcctgccccttacccacctgtaataccaattgcggacttactatatatcgcatatttatatcgtggggtaaagtgaaaatctactaccgatgatgtaagtcttacaatgttcgaaccagtaccagatcttaatttggaggcctccgtagaactaggggaggtaaatatagatcaaacaacacctatgataaaggaaaatagcggttttatatcccgtagtagacgtctattcgcccatagatctaaggatgatgagagaaaactagcactacgattctttttacaaagactttattttttagatcatagagagattcattatttgttcagatgcgttgacgctgtaaaagacgtcactattaccaaaaaaaataacattatcgtggcgccttatatagcacttttaactatcgcatcaaaaggatgcaaacttacagaaacaatgattgaagcattctttccagaactatataatgaacatagtaagaaatttaaattcaactctcaagtatccatcatccaagaaaaactcggataccagtttggaaactatcacgtttatgattttgaaccgtattactctacagtagctctggctattcgagatgaacattcatctggcatttttaatatccgtcaagagagttatctggtaagttcattatctgaaataacatatagattttatctaattaatctaaaatctgatcttgttcaatggagtgctagtacgggcgctgtaattaatcaaatggtaaatactgtattgattacagtgtatgaaaagttacaactggtcatagaaaatgattcacaatttacatgttcattggctgtggaatcagaacttccaataaaattacttaaagatagaaatgaattatttacaaaattcatcaacgagttaaaaaagaccagttcattcaagataagcaaacgcgataaggatacgctactaaaatattttacttaggactggagttagaatttatagacgactcatttcgtttatcattattactaccatcattattagtattcttcttgttatcttgttcagaaatatacagcaatgctatgcctaatactaaatacattatcatgcttgcaatggctctaacaacgacgaaccaaaatgaatttggtcgtagcttttgttcacaaaaatacataaagaaatgtctacataaatctatggcgccattggctacttgaaatagcgccagtcctcctacagattttaatatagctgtataacatgacatttattcatcatcaaaagagacagagtcaccatctgtcatatttagattttttttcatgtgttcaaagtatcctctactcatttcattataatagtttatcatacttagaattttaggacggatcaatgagtaagacttgactagatcgtcagtagtaatttgtgcatcgtctattctgcatccgcttcgtcgaataatgtatagcatcgctttgagattctccatagctatcaagtctttatacaatgacatggaaatatctgtgaatactttatacttctccaacatcgatgccttaacatcatcgcctactttagcattgaaaatacgttctattgtgtagatggatgtagcaagatttttaaacaacaatgccatcttacacgatgattgcctcaagtctccaatcgtttgtttagaacgattagctacagagttcaacgcttggctgactagcatattattatctttagaaattgtattcttcaatgaagcgtttatcatatctgtgatttcgttagtcatattacagtctgactgggttgtaatgttatccaacatatcacctatggatacggtacacgtaccagcatttgtaataatcctatctaagatgttgtatggcattgcgcagaaaatatcttctcctgtaatatctccactctcgataaatctactcagattattcttaaatgccttattctctggagaaaagatatcagtgtccatcatttcattaatagtatacgcagaaaagataccacgagtatcaattctatccaagatacttatcggttccgagtcacagataatggtttcctctccttcgggagatcctgcatagaaatatctaggacaatagtttctatactgtctgtaactctgataatctctaaagtcactaactgataccatgaaattgagaagatcaaacgctgaagtaatcaatttttctgcctcgtttttactacaactagttttcatcaatgtagtgacgatgtattgtttagttactcttggtctaatactgatgatagagatattattacttcccataatggatcttctagtagtcaccttaaagcccattgatgcaaatagcagatagataaagtcttggtatgactcctttctaatatagtacggactacctttgtcacccaactttatacccacataagccataacaacctctttaatagccgtttcatgaggtttatcagccatgagcctgagtagttggaagaatctcatgaatcccgtctcagaaagtcctatatgcatgatagatttatctttcctgggaaactctcgtatagtcatagatgaaatactcttcaaagtttctgaaataagattagtaacagtcttacctccgactactctgggtaacaaacatactctaataggtgttttctctgcggagataatatcagaaaggatagagcaataagtagtattattgtgattataaagaccgaatacataacaggtagaatttataaacatcatgtcctgaaggtttttagacttgtattcctcgtaatccataccgtcccaaaacatggatttggtaactttgatagccgtagatctttgttccttcgccaacaggttaaagaaattaataaagaatttgttgtttctatttatgtccacaaattgcacgtttggaagcgtaactgttacgttcactgcagcattttgaggatcgcgagtatgaagtacgatgttattgtttactggtatatctggaaagaaatctaccagtctaggaataagagattgatatcgcatagaaatagtaaagtttataatctcatcatcgaagagcattttgttaccattgtaataaatatccactctgtcatatgtataaatgaagtactgttcaaacatgatgagatgtttatatgttggcatagtagtgagatcgacgtttggtaatggcaatgtattaagattaactccataatgtctagcagcatctgcgatgttataagtgtcgtcaaagcggggtcgatcttgtgctgttatatattgtctaacacctataagattatcaaaatcttgtctgcttaatacaccgttaacaatttttgccttgaattcttttattggtgcattaataacatccttatagaggatgttaaacaaataagtgttatcaaagttaagatctggatatttcttttctgctagaacatccattgagtcggagccatctggtttaatataaccaccgataaatctagctctgtattctgtatccgtcaatctaatattaagaaggtgttgagtgaaaggtggaagatcgtaaaagctgtgagtattaatgataggattagtttccgaactaatgttaattggggtattaataatatctatatttccagcgttaagtgtaacattaaacagttttaattcacgtgacgtggtatcaattaaataattaatgcccaatttggatatagcagcctgaagctcatcttgtttagttacggatcctaatgagttattaagcaatatatcgaacggatgaacgaaggttgttttaagttggtcacatactttgtaatctagacatagatgcggaagaacggtagaaactatacgaaataaatattcagagtcctctaattgatcaagagtaactattgacttaataggcatcatttatttagtattaaatgacgaccgtaccagtgacggatatacaaaacgatttaattacagagttttcagaagataattatccatctaacaaaaattatgaaataactcttcgtcaaatgtctattctaactcacgttaacaacgtggtagatagagaacataatgccgccgtagtgtcatctccagaggaaatatcctcacaacttaatgaagatctatttccagatgatgattcaccggccactattatcgaacgagtacaacctcatactactattattgacgatactccacctcctacttttcgtagagagttattaatatcggaacaacgtcaacaacgagaaaaaagatttaatattacagtatcgaaaaatgctgaagcaataatggaatctagatctatgataacttctatgccaacacaaacaccatccttgggagtagtttatgataaagataaaagaattcagatgttagaggatgaagtggttaatcttagaaatcaacgatctaatacaaaatcatctgataatttagataattttaccaaaatactatttggtaagactccgtataaatcaacagaagttaataagcgtatagccatcgttaattatgcaaatttgaacgggtcccccttatcagttgaggacttggatgtttgttcggaggatgaaatagatagaatctataaaacgattaaacaatatcacgaaagtagaaaacgaaaaattatcgtcactaacgtgattattattgtcataaacattatcgagcaggcattgctaaaactcggatttgaagaaatcaaaggactgagtaccgatatcacttcagaaattatcgatgtggagatcggagatgactgcgatgctgtagcatctaaactaggaatcggtaacagtccggttcttaatattgtattgtttatactcaagatattcgttaaacgaattaaaattatttaatttaatacattcccatatccagacaacaatcgtctggattaatctgttcctgtcgtctcataccggacgacatattaatctttttattagtaggcatctttttagatggtttctttttcccagcattaactgagtcgatacctagaagatcgtgattgatctctccgaccattccacgaacttctaattggccgtctctgacggtaccataaactattttaccagcattagtaacagcttggacaatctgaccatccattgcgttgaatgatgtagttgctgttgttctacgtttaggagcaccagaagtatttttggagcccttggaggctgatgtagaagaagacgaggattttgatttacatgtaatacattttgtactctttgattttgtatcacatgcgccggcagtcacatttgtttgagaattaagattattgttgcctcctttgacggctgcatctccaccgatttgcgctagtagatttttaagctgtggtgtaatcttattaactgtttcgatataatcatcgtaactgcttctaacggctaaattttttttatccgccatttagaagctaaaaatatttttatttatgcagaagatttaactagattatacaatgaactaatatgatccttttccagattatttacaaacttggtattttttggttctggaggaggcgaatttaaattcggacttggattcggattttgtgagttcttgatcttattatacatcgagtataggatggcgacggtaactgctacgcaaataccgatcaacaaaagaataccaatcatttattgacaataacttcactattgatcaagtatgcaatatatcatcttttcactaaataagtagtaataatgattcaacaatgtcgagatatatggacgataataatttagttcatggaaatatcgctatgattggtatgaatgactccgctaactctgtggggtgcgcagtgctttccccacatagaataaattagcattccgactgtgataataataccaagtataaacgccataatactcaatactttccatgtacgagtgggactggtagacttactaaagtcaataaaggcgaagatacacgaaagaatcaaaagaatgattccagcgattagcacgccggaaaaataatttccaatcataagcatcatgtccatttaactaataaaaattttaaatcgccgaatgaacaaagtggaatataaaccatataaaaacaatagtttgtactgcaaaaataatatctatttttgttttcgaagatatggtaaaattaaatagtagtacacagcatgttataactaacagcagcaacggctcgtaattacttatcatttactagacgaaaaggtggtgggatattttcttgctcaaataatacgaatatatcacccatccattttatgcgatgtttatatactctaatctttaatagatctatagacgacgggtttaccaacaatatagattttatcgattcatctaatttaaacccttccttaaacgtgaatgatctattatctggcataacgatgactctacctgatgaatcggacaatgtactgggccatgtagaataaattatcaacgaattatcgtctacgaacatttatatcatttgttttaattttaggacgcgaataaatggatataaaatagaaaataacagatattacaaccaatgttatggccgcgcccaaccaggtaggcagttttattttatcttttactacaggttctcctggatgtacgtcaccaacggcggacgtagttctagtacaattagacgtaagttctgcttgggaattttttaacgctaaagagttaacgttaatcgtgcacccaacgtatttacatctagttctttgaacatcttgattataatataaccattttctatctctagattcgtcggtgcactcatgtaaccaacataccctaggtcctaaatatttatctccggaattagattttggataattcgcgcaccaacaatttctatttcctttatgatcgttacaaaagacgtataatgccgtatccccaaaagtaaaataatcaggacgaataattctaataaactcagaacaatatctcgcatccatatgtttggagcaaatatcggaataagtagacatagccggtttccgttttgcacgtaaccattctaaacaattggggtttccaggatcgtttctacaaaatccagtcatgaaatcatcacaatgttctgtcttgtaattattattaaatatttttggacagtgtttggtatttgtcttagaacaacattttgccacgctatcactatcgcccaggagataatccttttttataaaatgacatcgttgcccggatgctatataatcagtggcgtgttttaaatccttaatatattcaggagttacctcgttctgataatagattaatgatccaggacgaaatttgaaagaactacatggttctccatgaattaatacatattgtttagcaaattcaggaactataaaactactacaatgatctatcgacataccatctatcaaacaaaacttgggtttaatttctcccggagatgtttcataatagtacgtataactttcttctgcaaacttaacagctctattatattcaggataattaaaacctaattccatatatttgtctcgtatatctgctattcctggtgctattttaattctattaagagtaacggctgcccccattcttaataatcgtcagtatttaaactgttaaatgttggtatatcaacatctaccttatttcccgcagtataaggtttgttgcaggtatactgttcaggaatggttacatttatacttcttctatagtcctgtctttcgatgttcatcacatatgcaaagaacagaataaacaaaataatgtaagaaataatattaaatatctgtgaattcgtaaatacattgattgccataataattacagcagctacaatacatacaatagacattcccacagtgttgccattacctccacgatacatttgagttactaagcaataggtaataactaagctagtaagaggcaatagaaaagatgagataaatatcatcaatatagagattagaggagggctatatagagccaagacgaacaaaatcaaaccgagtaacgttctaacatcattatttttgaagattcccaaataatcattcattcctccataatcgttttgcattatacctccatctttaggcataaacgattgctgctgttcctctgtaaataaatctttatcaagcactccagcacccgcagagaagtcgtcaagcatattgtaatatcttaaataactcatttatatattaaaaaatgtcactattaaagatggagtataatctttatgccgaactaaaaaaaatgacttgtggtcaacccctaagtctttttaacgaagacggggatttcgtagaagttgaaccgggatcatcctttaagtttctgatacctaagggattttacgcctctccttccgtaaagacgagtctagtattcgagacattaacaacgaccgataataaaatcactagtatcaatccaacaaatgcgccaaagttatatcctcttcaacgcaaagtcgtatctgaagtagtttctaatatgaggaaaatgatcgaatcaaaacgtcctctatacattactcttcacttggcgtgtggatttggtaagactattaccacgtgttatcttatggctacacacggtagaaaaaccgtcatttgcgtacccaataaaatgttaatacatcaatggaagacacaggtagaggcagtcggattggaacataagatatctatagatggagtaagtagtctattaaaggaactaaagactcaaagtccggatgtattaatagtagtcagtagacatctgacaaacgatgccttttgtaaatatatcaataagcattatgatttgttcatcttggatgaatcacatacgtataatctgatgaacaatacagcagttacaagatttttagcgtattatcctccgatgatgtgttattttttaactgctacacctagaccagctaaccgaatttattgtaacagtattattaatattgccaagttatccgatctaaaaaaaactatctatgcggtagatagtttttttgagccatattccacagacaatattagacatatggtaaaacgactagatggaccatctaataaatatcatatatatactgagaagttattatctgtagacgagcctagaaatcaacttattcttgataccctggtagaagaattcaagtcaggaactattaatcgaattttagttattactaaactacgtgaacatatggtattcttctacaaacgattattagattttttcggatcagaggttgtatttataggagacgcccaaaatagacgtactccagatatggtcaaatcaatcaaggaactaaatagatttatattcgtatccaccttattttattccggtactggtttagatattcctagtttggattcgttgttcatttgctcggcagtaatcaacaatatgcaaatagagcaattactagggagggtatgtcgagaaacagaactattagataggacggtatatgtatttcctaacacatccatcaaagaaataaagtacatgataggaaatttcatgcaacgaattattagtctgtctgtagataaactaggatttaaacaaaaaagttatcggaaacatcaagaatccgatcccacttctgtatgtacaacatcctccagagaagaacgtgtattaaatagaatatttaactcgcaaaatcgttaagaagtttaagcgacgatccgcatgctgcgcaggccagtgtattacccctcatagtattaatataatccaatgatacttttgtgatgtcggaaatcttaaccaatttagactgacaggcagaacacgtcatgcaatcatcatcgtcatcgataactgtagtcttgggcttctttttgcggctcttcattccggaacgcacattggtgctatccatttaggtagtaaaaaataagtcagaatatgccctatagcacgatcgtgcaaaacctggtatatcgtctctatctttatcacaatatagtgtatcgacatttttattattattgacctcgtttatcttggaacatggaatgggaacatttttgttatcaacggccatctttgccttaattccagatgttgtaaaattataactaaacagtctatcatcgacacaaatgaaattcttgtttagacgtttgtagtttacgtatgcggctcgttcgcgtctcattttttcagatattgcaggtactataatattaaaaataagaatgaaataacataggattaaaaataaagttatcatgacttctagcgctgatttaactaacttaaaagaattacttagtctgtacaaaagtttgaaattttcagattctgcggctatagaaaagtataattctttggtagaatggggaacatctacttactggaaaataggcgtgcaaaaggtagctaatgtcgagacgtcaatatctgattattatgatgaggtaaaaaataaaccgtttaatattgatccgggatattacattttcttaccggtatattttggaagcgtctttatttattcgaagggtaaaaatatggtagaacttggatctggaaactcttttcaaataccagatgatatgcgaagtgcgtgtaacaaagtattagacagcgataacggaatagactttctgagatttgttttgttaaacaatagatggataatggaagatgctatatcaaaatatcagtctccagttaatatatttaaactagctagtgagtacggattaaacatacccaaatatttagaaattgaaatagaggaagacacattatttgacgacgagttatactctattatagaacgctctttcgatgataaatttccaaaaatatccatatcgtatattaagttgggagaacttagacggcaagttgtagactttttcaaattctcgttcatgtatattgagtccatcaaggtagatcgtataggagataatatttttattcctagcgttataacaaaatcaggaaaaaagatattagtaaaagatgtagaccatttaatacgatccaaggttagagaacatacatttgtaaaagtaaaaaagaaaaacacattttccattttatacgactatgatggaaacggaacagaaactagaggagaagtaataaaacgaattatagacactataggacgagactattatgttaacggaaagtatttctctaaggttggtagtgcaggcttaaagcaattgactaataaattagatattaatgagtgcgcaactgtcgatgagttagttgatgagattaataaatccggaactgtaaaacgaaaaataaaaaaccaatcagcatttgatttaagcagagaatgtttgggatatccagaagcggattttataacgttagttaataacatgcggttcaaaatagaaaattgtaaggttgtaaatttcaatattgaaaatactaattgtttaaataacccgagtattgaaactatatatggaaactttaaccagttcgtctcaatctttaatatcgtcaccgatgtcaaaaaaagattattcgagtgaaataatatgcgcctttgatataggtgcaaaaaatcctgccagaactgttttagaagtcaaggataactccgttagggtattggatatatcaaaattagactggagttctgattgggaaaggcgcatagctaaagatttgtcacaatatgaatacactacagttcttctagaacgtcagcctagaaggtcgccgtacgtcaaatttatctattttattaaaggctttttatatcatacatcggctgccaaagttatttgcgtctcgcctgtcatgtctggtaattcatatagagatcgaaaaaagagatcggtcgaagcatttcttgattggatggacacattcggattgcgagactccgttccggatagacgcaaattagacgatgtagcggatagtttcaatttggctatgagatacgtattagataaatggaatactaattatacaccttataataggtgtaaatctagaaattacataaaaaaaatgtaataacgttagtaacgccattatggataatctatttacctttctacatgaaatagaagatagatatgccagaactatttttaactttcatctaataagttgcgatgaaataggagatatatatggtcttatgaaagaacgcatttcctcagaggatatgtttgataatatagtgtataataaagatatacatcatgccattaagaaactagtgtattgcgacatccaacttactaaacacattattaatcagaatacgtatccggtatttaacgattcttcacaagtgaaatgttgtcattatttcgacataaactcagataatagcaatattagctctcgtacagtagagatatttgagagggaaaagtcatctcttgtatcatatattaaaactaccaataagaagagaaaggtcaattacggcgaaataaagaaaactgttcatggaggcactaatgcaaattacttttccggtaaaaagtctgacgagtatctgagtactacagttagatccaacattaatcaaccttggatcaaaaccatctctaagaggatgagagttgatatcattaatcactctatagtaacgcgtggaaaaagctctatattacaaactatagaaattatttttactaatagaacatgtgtgaaaatattcaaggattctactatgcacattattctatccaaggacaaggatgaaaaggggtgtatacacatgattgacaaattattctatgtctattataatttatttctgttgttcgaggatatcatccaaaacgagtactttaaagaagtagctaatgttgtaaaccacgtacttacggctacggcattagatgagaaattattcctaattaagaaaatggctgaacacgatgtttatggagttagcaatttcaaaatagggatgtttaacctgacatttattaagtcgttggatcataccgttttcccctctctgttagatgaggatagcaaaataaagttttttaaggggaaaaagctcaatattgtagcattacgatctctggaggattgtataaattacgtgactaaatccgagaatatgatagaaatgatgaaggaaagatcgactattttaaatagcatagatatagaaacggaatcggtagatcgtctaaaagaattgcttctaaaatgaaaaaaaacactgattcagaaatggatcaacgactcggatataagtttttggtgcctgatcctaaagccggagttttttatagaccgttacatttccaatatgtatcgtattctaattttatattgcatcgattgcatgaaatcttgaccgtcaagcggccactcttatcgtttaagaataatacagaacgaattatgatagaaattagcaatgttaaagtgactcctccagattactcacctataatcgcgagtattaaaggtaagagttatgacgcattagccacgttcactgtaaatatctttaaagaggtaatgaccaaagagggtatatccatcactaaaataagtagttatgagggaaaagattctcatttgataaaaattccgctactaataggatacgggaataaaaatccacttgatacagccaagtatcttgttcctaatgtcataggtggagtctttatcaataaacaatctgtcgaaaaagtaggaattaatctagtagaaaagattacaacatggccaaaatttagggttgttaagccaaactcattcactttctcgttttcctccgtatcccctcctaatgtattaccgacaagatatcgccattacaagatatctctggatatatcacaattggaagcgtcgaatatatcatcgacaaagacatttataacggtcaatattgttttgctgtctcaatatttatctagagtgagtctagaattcattagacgtagcttatcatacgatatgcctccagaagttgtctatctagtaaacgcgataatagatagtgctaaacgaattactgaatctattactgactttaatattgatacatacattaatgacctggtggaagctgaacacattaaacaaaaatctcagttaacgatcaacgagttcaaatatgaaatgctgcataactttttacctcatatgaactatacacccgatcaactaaagggattttatatgatatctttactaagaaagtttctctactgtatctaccacacttctagatatccagatagagattcgatggtttgtcatcgtatactaacatacggcaaatattttgagacgttggcacatgatgaattagagaattacataggcaacatccgaaacgatatcatgaacaatcacaagaacagaggcacttacgcggtaaacattcatgtactaacaactcctggacttaatcatgcattttctagtctattgagtggaaagttcaaaaagtcagacggtagttatcgaacacatcctcactattcatggatgcagaatatttctattcctaggagtgttggattttatccggatcaagtaaagatttcaaagatgttttctgtcagaaaataccatccaagtcaatatctttacttttgttcatcagacgttccggaaagaggtcctcaggtaggtttagtatctcaattgtctgtcttgagttccattacaaatatactaacgtctgagtatttggatttggaaaagaaaatttgtgagtatatcagatcatattataaagatgatataagttactttgaaacaggatttccaatcactatagaaaatgctctagtcgcatctcttaatccaaatatgatatgtgattttgtaactgactttagacgtagaaaacggatgggattcttcggtaacttggaggtaggtattactttagttagggatcacatgaatgaaattcgcattaatattggagcgggaagattagtcagaccattcttggttgtggataacggagagctcatgatggatgtgtgtccggagttagaaagcagattagacgacatgacattctctgacattcagaaagagtttccgcatgtcatcgaaatggtagatatagaacaatttacttttagtaacgtatgtgaatcggttcaaaaatttagaatgatgtcaaaggatgaaagaaagcaatacgatttatgtgactttcctgccgaatttagagatggatatgtggcatcttcattagtgggaatcaatcacaattctggacccagagctattcttggatgtgctcaagctaaacaagctatctcttgtctgagctcggatatacgaaataaaatagacaatggaattcatttgatgtatccagagaggccaatcgtgattagtaaggctttagaaacttcaaagattgcggctaattgcttcggccaacatgttactatagcattaatgtcgtacaaaggtatcaatcaagaggatggaattatcatcaaaaaacaatttattcagagaggcggtctcgatattgttacagccaagaaacatcaagtagaaattccattggaaaactttaataacaaagaaagagataggtctaacgcctattcaaaattagaaagtaatggattagttagactgaatgctttcttggaatccggagacgctatggcacgaaatatctcatcaagaactcttgaagatgattttgctagagataatcagattagcttcgatgtttccgagaaatataccgatatgtacaaatctcgcgttgaacgagtacaagtagaacttactgacaaagttaaggtacgagtattaaccatgaaagaaagaagacccattctaggagacaaatttaccactagaacgagtcaaaagggaacagtcgcgtatgtcgcggatgaaacggaacttccatacgacgaaaatggtatcacaccagatgtcattattaattctacatccatcttctctagaaaaactatatctatgttgatagaggttattttaacagccgcatattctgctaagccgtacaacaataagggagaaaaccgacctgtctgttttcctagtagtaacgaaacatccatcgatacatatatgcaattcgctaaacaatgttatgagcattcaaatccgaaattgtctgatgaagaattatcggataaaatcttttgtgaaaagattctctatgatcctgaaacggataagccttatgcatccaaagtattttttggaccaatttattacttgcgtctgagacatttaactcaggacaaggcaaccgttagatgtagaggtaaaaagacgaagctcattagacaggcgaatgagggacgaaaacgtggaggaggtatcaagttcggagaaatggagagagactgtttaatagcgcatggtgcagccaatactattacagaagttttgaaagattcggaagaagattatcaagatgtgtatgtttgtgaaaattgtggagacatagcagcacaaatcaagggtattaatacatgtcttagatgttcaaaacttaatctctctcctctcttaacaaaaattgataccacacacgtatctaaagtatttcttactcaaatgaacgccagaggcgtaaaagtcaaattagatttcgaacgaagacctccttcgttttataaaccattagataaagttgatctcaaaccgtcttttctggtctaatattgtttagtagatacttatcaacatcatcaagattatcaagattatcaagattatcaagataagctaattcactaaacacattatcgatttcggtatcgttactcgcagaataaagttcgttatgatcctgatattcggaaatctgtggagtttcaggttttggtggatgtgtaacagctacttgagataccgaagtctgatattcagaaagctgtggatgttctggttcggcatccaccgatggtgttacaccactactaattggttcagtaacgtctgtggacgatggaggcaccacttctacaggttctggttctttatcctcagtcatcaacggagctacttcaatgcgaggaaatgtataatttggtaatggtttctcatgtggatctgaagaagaggtaagatatctactagaaagataccgatcacgttctagttctcttttgtagaacttaactttttctttctcagcatctagttgatattccaacctcttcacgttactacgttcagatttcaattcacgttcgcatgggttacctccgcagtttttacgagcgatttcacgttcagccttcatgcgtctctccctctctctatcgagtttatcagagcagtctttctgaaggcgatcgaactccataaatttctccaacgctttgattgtttccatagatttccgaagttcagcttttaggactgtgattctttttctttcgaattcacagctggatgtacaaccgtttccattaccgccatctctaagtttcttttctagatcggcaacatttcatccccatgccttttacattcctcgagtctactgtcgtcgaaatatcgttccagctccttttcgacatcaataactttagcacgttgtctctcaagctctcttttgtagttatctgattccctggcacgtttaagatcttcatgcaattgagtcagctcttaacacaatctcttgcttcttcgtcatagtacgcgcaatcactgtgagatccattgttaccacgtctacactcggcgagctcgcgtttaagagattcaatttcccgtttgtattggtccatgtttccattgctaccaccattagatttacaggctgctagttgtcgttcgagatcagaaatacgggttttcttggaattgatttcgtcgatgtacttggcatcgaaacacttattaagttctttttccaattctacgattttatttctttcgcgagtcaattccctcctgtagtaactatctgttttgtcagattcacgctctctacgtagactttcttgcaagttactaatttgttccctagcacgtccgagtttagttttatatgctgaatagagttctgattcatcctttgagcagatctctagcgatcgtttaagattcctgattctagtctttagcctatttacctcctcagaagatgttccgttaccgttgcgtttacactcgttaagctgtctatcaagatccatgattctatctctaagacgttgcatctctctttccatatcagcattgctttcattattacgtctgcagtcactcaactgtctttcaatatctgagattctatctctaagacgtcgcatctctctctgtttcggcattggtttcattattacgtctacagtcgttcaactgtctttcaagatctgatattctagattggagtctgctaatctctgtagcattttcacggcattcactcagttgtctttcaagatctgaaattttagattggagtctgctaatctctgtaagatttcctcctccgctctcgatgcagtcggtcaacttattctctagttctctaatacgcgaacgcagtgcatcaacttcttgcgtgtcttcctggttgcgtgtacattcatcgagtctagattcgagatctctaacgcgtcgtcgttcttcctcaagttctctgcgtactacagaaagcgtgtccctatcttgttgatatttagcaatttctgattctagagtactgattttgcttacgtagttactaatatttgtcttggccttatcaagatcctccttgtatttgtcgcattccttgatatccctacgaagtctggacagttcccattcgacattacgacgtttatcgatttcagctcggagatcgtcatcgcgttgttttagccacatacgactgagttcaagttctcgttgacaagatccatctacttttccattcctaatagtatccagttccttttctagttctgaacgcatttctcgttccctatcaagcgattctctcaattctcggatagtcttcttatcaatttctaataaatctgaaccatcatctgtcccattttgaatatccctgtgttctttgatctcttttgtaagtcggtcgattctttcggttttataaacagaatccctttccaaagtcctaatcttactgagtttatcactaagttctgcattcaattcggtgagttttctcttggcttcttccaactctgttttaaactctccactatttccgcattcttcctcgcatttatctaaccattcaattagtttattaataactagttggtaatcagcgattcctatagccgttcttgtaattgtgggaacataattaggatcttctaatggattgtatggcttgatagcatcatctttatcattattagggggatggacaaccttaattggttggtcctcatctcctccagtagcgtgtggttcttcaatagccgtgttagtaataggcttaggcaaatgcttgtcgtacgcgggcacttcctcatccatcaagtatttataatcgggttctacgtctgaatattcttttctaagagacgcaacttctggagttagtagaagaactctgtttctatatctatcaacgctggaatcaatactcaagttaaggatagcgaatacctcatcgtcatcatccgtatcctctgaaacgccatcatatgacatttcatgaagtctaacgtattgataaacagaatcagatttagtattaaacagatccttaacctttttagtaaatgcatatgtatattttagatctccagatttcataatatggtcgcatgccttaaatgtcagtgcttccataatatagtctggaacactaattggtgatgaaaaagataccggaccatatgctacgttgataaataactctgagccactaactagataatgattaatgttaaggaagaggaaatattcagtgtataggtatgtcttggcgtcatatcttgtactaaacacgctaaacagtttgttaatgtgatcaatttccaatagattaattagagcagcaggaataccaacaaacatattaccacatccgtattttctatgaatatcacatatcatgttaaaaaatcttgatagaagagcgaatatctcgtctgacttaatgagtcgtagttcagcagcaacataagtcataactgtaaatagaacatactttcctgtagtgttgattctagactccacatcaacaccattattaaaaatagttttatatacatctttaatctgctctccgttaatcgtcgaacgttctagtatacggaaacactttgatttcttatctgtagttaatgacttagtgatatcacgaagaatattacgaattacatttcttgtttttcttgagagacctgattcagaactcaactcatcgttccatagtttttttacctcagtggcgaaatctttggagtgcttggtacatttttcaataaggttcgtgacctccatttattataaaaaaattttattcaaaacttaactacaatcgggtaattataaaatcgtagatctcccatgtggtggaatactaccatctatcgcatgtggatggacagtaggtaatggccatgggaacagtaatgtttgcatatttatctttcttgccagtattactgcatattgtcccaatgtttcgatgtgatgttctaacctatcaactgccgctgtatcacaacaatagtgtccgatgaaattaagattatgatccaatgtgtttaatatatgattatcaagtcttatacgatccgcgtcttttttgacaggatcaggttcttctacaggaagaagtttcggcctcttatgatattcatgtctgggaaacggtggtctagggtgaggctccggtatcggagtgggttttggattataatcatcatcgtctatgacatcatcttcgacttcgatatttattttgctatcttgatgatgtcctgtatcagttgcattttcagcactcgactgaatattagcgcattcattgtttattattaccatatttctaaacccaaaatgtatatgttgaacatcagtactatcgttgatgagtcttatagcatgaattcgcttatcgttatcgggtttagcttctgtcaccttagcaattccttttttattaaactctacataatcatatccatttctattgtttgttctaatataaacgagtatagcatcattgctaaatttttcaatagtatcgaaaacagaatatcctaaaccatataatatatattcaggaacactcaaactaaatgtccaggattctcctaaatacgtaaactttaatagtgcgaaatcattcaaaaatctaccacttatagatagatagtacataaatgcgtatagtagtctacctatctctttattatgaaaaccggcattacgatcatatatgtcgtgatatacctgtgatccgtttacgttaaaccataaatacatgggtgatcctataaacatgaatttatttctaattctcagagctatagttaattgaccgtgtaatatttgcttacatgcatacttgatacgctcattaataagatttttatcattgctcgttatctcagaatcgtatatataaggagtaccatcgtgattcttaccagatattatacaaaatactatatataaaatatattgaccaacgttagtaatcatataaatgtttaacgttttaaattttgtattcaatgatccattatcatacgctagcatggtcttatgatattcattctttaaaatataatattgtgttagccattgcattggggctcctaatggagattttttattctcatccattttaggataggctttcataaagtccctaataacttcgtgaataatgtttctatgttttctactgatgcatgtatttgcttcgatttttttatcccatgtttcatctatcatagatttaaacgcagtaatgctcgcaacattaacatcttgaaccgttggtacaattccgttccataaatttataatgttcgccatttatataactcattttttgaatatacttttaattaacaaaagagttaagttactcatatggacgccgtccagtctgaacatcaatctttttagccagagatatcatagccgctcttagagtttcagcgtgattttccaacctaaatagaacttcatcgttgcgtttacaacacttttctatttgttcaaactttgttgttacattagtaatctttttttccaaattagttagccgttgtttgagagtttcctcattgtcgtcttcatcggctttaacaattgcttcgcgtttagcctctggctttttagcagcctttgtagaaaaaaattcagttgctggaattgcaagatcgtcatctccggggaaaagagttccgtccatttaaagtacagattttagaaactgacactctgcgttatttatatttggtacaacacatggattataaatattgatgttaataacatcagaaaatgtaaagtctatacattgttgcatcgtgttaaattttctaatggatctagtattattgggtccaacttctgcctgaaatccaaatatggaagcggatacaaaaccgtttcctggataaaccacacatctccacttttgctttacatcagaaattgtgtcattgacatcttgaactctcctatctaatgccggtgttccacctatagattttgaatattcgaatgctgcatgagtagcattaaattccttaatattgccataattttcatatattgagtaaccctggataaaaagtaaacacaccgcagccgtcgctaccacaataaaaaaaattgatagagagttcatttataatctattagaagctgacaaaatttttttacacgcatcagacaatgctttaataaatagttcaacatctacttttgtcatatcgaaccgatggtatgattctaacctagaattacatccgaaaaagttgactatgttcatagtcattaagtcattaacaaacaacattccagactctggattataagacgatactgtttcgtcacaattacctaccttaatcatgtgattatgaatattggctattagagcaccttctaagaaatctataatatctttgaaacacgatttaaaatcaaaccacgaatatacttctacgaagaaagttagtttacccataggagaaataactataaatggagatctaaatacaaaatccggatctatgatagttttaacattattatattctctattaaatacctccacatctaaaaatgttaattttgaaactatgtcttcgtttattaccgtacctgaactaaacgctataagctctattgtttgagaactctttaaacgatattcttgaaatacatgtaacaaagtttcctttaactcggtcggtttatctaccatagttacagaatttgtatccttatctataatataataatcaaaatcgtataaagttatataattatcgcgttcagattgtgatcttttcaaatagactaaaaaccccatttctctagtaagtatcttatgtatatgtttgtaaaatatcttcatggtgggaatatgctctaccgcagttagccattcctcattgacagcggtagatgtattagacaaaactattccaatgtttaacaagggccattttacgagattattaaatccttgtttgataaatgtagccaatgagggttcgagttcaacgacgattgaattctcttcccgcggatgctgcatgatgaacgacgggatgttgttcgattgatttggaattctttttcgactttttgtttatattaaatattttaaaatttatagctgatagcaattcatgtactacggataatgtagacgcgtattgcgcatcgatatctttattattagataaatttatcaataaatgtgagaagtttgcctcgttaaggtcttccatttaaatattatataaacatttgtgtttgtatcttattcgtcttttatggaatagttttttactagtaaagctgcaattacacactttgtccgtaaaacataaatataaacaccagcttttatcaatcgttccaaaaagtcgacggcggacatttttaacatggcatctattttaaatacacttaggtttttggaaaaaacatcattttataattgtaacgattcaataactaaagaaaagattaagattaaacataagggaatgtcatttgtattttataagccaaagcattctaccgttgttaaatacttgtctggaggaggtatatatcatgatgatttggttgtattggggaaggtaacaattaatgatctaaagatgatgctattttacatggatttatcatatcatggagtgacaagtagtggagcaatttacaaattgggatcgtctatcgatagactttctctaaataggactattgttacaaaagttaataattatgatgatacattttttgacgacgatgattgatcgctattgcacaattttgtttttttactttctaatatagcgtttagattctttttcatgtgcgaatattgatttactaaaatatcgatgtttaacttttgttctatgacgtccttatcagcggtatcggtacatatacgtaattcaccttcacaaaatacggagtcttcgataataatagccaatcgattattggatctagcggtctgtatcatattcaacatgtttaatatatcctttcgtttcccctttacaggcatcgatcgtagcatattttccgcgtctgagatggaaatgttaaaactacaaaaatgcgtaatgttagcccgtcctaatattggtacgtgtctataagtttggcatagtagaataatagacgtgtttaaatgccttccaaagtttaagaattctattagagtattgcattttgatagtttatcgcctacatcatcaaaaataagtaaaaagtgtgctgattttttatgattttgtgcgacagcaatacatttttctatgttacttttagttcgtatcagattatattctagagattcctgactactaacgaaattaatatgatttggccaaatgtatccatcataatctggattataaacgggtgtaaacaagaatatatgtttatattttttaactagtgtagaaaacagagatagtaaatagatagtttttccagatccagatcctcccgttaaaaccattctaaacggcatttttaataaattttctcttgaaaattgtttttcttggaaacaattcataattatatttacagttactaaattaatttgataataaatcaaaatatggaaaactaaggtcgttagtagggaggagaacaaagaaggcatatcgtgatataaataacatttattatcatgatgacaccagaaaacgacgaagagcagacatctgtgttctccgctactgtttacggagacaaaattcagggaaagaataaacgcaaacgcgtgattggtctatgtattagaatatctatggttatttcactactatctatgattaccatgtccgcgtttctcatagtgcgcctaaatcaatgcatgtctgctaacgaggctgctattactgacgccgctgttgccgttgctgctgcatcatctactcatagaaaggttgcgtctagcactacgcaatatgatcacaaagaaagctgtaatggtttatattaccagggttcttgttatatattacattcagactaccagttattctcggatgctaaagcaaattgcactgcggaatcatcaacactacccaataaatccgatgtcttgattacctggctcattgattatgttgaggatacatggggatctgatggtaatccaattacaaaaactacatccgattatcaagattctgatatatcacaagaagttagaaagtatttttgtgttaaaacaatgaactaatatttatttttgtacattaataaatgaaatcgcttaatagacaaactgtaagtaggtttaagaagttgtcggtgccggccgctataatgatgatactctcaaccattattagtggcataggaacatttctgcattacaaagaagaactgatgcctagtgcttgcgccaatggatggatacaatacgataaacattgttatctagataccaacattaaaatgtctacagataatgcggtttatcagtgtcgtaaattacgagctagattgcctagacctgatactagacatctgagagtattgtttagtattttttataaagattattgggtaagtttaaaaaagaccaataataaatggttagatattaataatgataaagatatagatattagtaaattaacaaattttaaacaactaaacagtacgacggatgctgaagcgtgttatatatacaagtctggaaaactggttgaaacagtatgtaaaagtactcaatctgtactatgtgttaaaaaattctacaagtgacaacaaaaaatgaattaataataagtcgttaacgtacgccgccatggacgccgcgtttgttattactccaatgggtgttgactataacagatacattgtatgatgatctcgatatctcaatcatggactttataggaccatacattataggtaacataaaaactgtccaaatagatgtacgggatataaaatattccgacatgcaaaaatgctactttagctataagggtaaaatagttcctcaggattctaatgatttggctagattcaacatttatagcatttgtgccgcatacagatcaaaaaataccatcatcatagcatgcgactatgatatcatgttagatatagaagataaacatcagccattttatctattcccatctattgatgtttttaacgctacaatcatagaagcgtataacctgtatacagctggagattatcatctaatcatcaatccttcagataatctgaaaatgaaattgtcgtttaattcttcattctgcatatcagacggcaatggatggatcataattgatgggaaatgcaatagtaattttttatcataaaagttgtaaagtaaataataaaacaataaatattgaactagtagtacgtatattgagcaatcagaaatgatgctggtacctcttatcacggtgaccgtagttgcgggaacaatattagtatgttatatattatatatttgtaggaaaaagatacgtactgtctataatgacaataaaattatcatgacaaaattaaaaaagataaagagttctaattccagcaaatctagtaaatcaactgatagcgaatcagactgggaggatcactgtagtgctatggaacaaaacaatgacgtagataatatttctaggaatgagatattggacgatgatagcttcgctggtagtttaatatgggataacgaatccaatgttatggcgcctagcacagaacacatttacgatagtgttgctggaagcacgctgctaataaataatgatcgtaatgaacagactatttatcagaacactacagtagtaattaatgaaacggagactgttaaagtacttaatgaagataccaaacagaatcctaactattcatccaatcctttcgtaaattataataaaaccagtatttgtagcaagtcaaatccgtttattacagaacttaacaataaatttagtgagaataatccgtttagacgagcacatagcgatgattatcttaataagcaagaacaagatcatgaacacgatgatatagaatcatcggtcgtatcattggtgtgattagtttcctttttataaaattgaagtaatatttagtattattgctgccgtcacgttgtacaaatggagatattccctgtattcggcatttctaaaattagcaattttattgctaataatgactgtagatattatatagatacagaacatcaaaaaattatatctgatgagatcaatagacagatggatgaaacggtacttcttaccaacatcttaagcgtagaagttgtaaatgacaatgagatgtaccatcttattcctcatagattatcgacgattatactctgtattagttctgtcggaggatgtgttatctctatagataatgacgtcaatggcaaaaatattctaacctttcccattgatcatgctgtaatcatatccccactgagtaaatgtgtcgtagttagcaagggccctacaaccatactggttgctaaagcggatatacccagcaaacgattggtaacatcgtttacaaacgacatactgtatgtaaacaatctatcactgattaattatttgccgttgtctgtattcattattagacgagtcaccgactatttggatagacacatatgcgatcagatatttgctaataataagtggtattcccttataaccatcgacgataagcaatatcctattccatcaaattgtataggtatgtcttctgccaagtacataaattctagcatcgagcaagatactttaatacatgtttgtaacctcgagcatccattcgacttagtatacaaaaaaatgcagtcgtacaattctgtacctatcaaggaacaaatattgtacggtagaattgataatataaatatgagcattagtatttctgtggattaatagatttctagtatggggatcattaatcatctctaatctctaaatacctcataaaacgaaaaaaaagctattatcaaatactgtacggaatagattcattctcttctctttttatgaaactctgttgtatatctactgataaaactggaagcaaaaaatctgataaaaagaataagatcaagatcaaggattatatggaacacgattattataaaataacaatagttcctggttcctcttccacgtctactagctcgtggtattatacacatgcctagtaatagtctctttgcgttgatggaaagcagactagaaataacaggctaaaatgttcagacaccataatagttcccaacccagataataacagagtaccatcaacacattcctttaaactcaatcccaaacccaaaaccgttaaaatgtatccggccaattgatagtagataatgaggtgtacagcgcatgataatttacacagtaaccaaaatgaaaatactttagtaattataagaaatatagatggtaacgtcatcatcaacaatccaataatatgccggagagtaaacattgacggataaaacaaaaatgctccgcataactctatcatggcaataacacaaccaaatacttgtaagattcctaaattagtagaaaatacaacggatatcgatgtataagtgatctcgagaaataataagaataaagtaatgcccgtaaagataaacatcaacattgtttggtaatcattaaaccaattagtatgacgttgaactaatttcacagtaaattttattccagtattatccccgcatgtataagtacctggtaagatatctttatattccataatcaatgagacatcactatctgataacgaatgaagtctagcactagtatgccatttacttaatattgtcgtcttggaagttttattataagttaaaatatcatggttatccaatttccatctaatatactttgtcggattatctatagtacacggaataatgatggtatcattacatgctgtatactctatggtctttgtagttgttataacaaccaacgtatagaggtatatcaacgatattctaactcttgacattttttatttatttaaaatgatacctttgttatttattttattctattttgctaacggtattgaatggcataagtttgaaacgagtgaagaaataatttctacttacttattagacgacgtattatacacgggtgttaatggggcggtatacacattttcaaataataaactaaacaaaactggtttaactaataataattatataacaacatctataaaagtagaggatgcggataaggatacattagtatgcggaaccaataacggaaatcccaaatgttggaaaatagacggttcagacgacccaaaacatagaggtagaggatacgctccttatcaaaatagcaaagtaacgataatcagtcacaacggatgtgtactatctgacataaacatatcaaaagaaggaattaaacgatggagaagatttgacggaccatgtggttatgatttattcacggcggataacgtaattccaaaagatggtttacgaggagcattcgtcgataaagacggtacttatgacaaagtttacattcttttcactgatactatcggctcaaagagaattgttaaaattccgtatatagcacaaatgtgcctaaacgacgaaggtggtccatcatcgttgtctagtcatagatggtcgacgtttctcaaagtcgaattagaatgtgatatcgacggaagaagttatagataaattattcattctaaaactataaaaacagataatgatacgatactatatgtattcttcgatagtccgcattatgtacctattctatgaataccattaaacaatctttttctacgtcaaaattggaaggatatacaaagcaattgccgtctccagctcctggtatatgtctaccagctggaaaagttgttccacataccacgtttgaagtcatagaaaaatataatgtactagatgatattataaagcctttatctaaccaacctatcttcgaaggaccgtctggtgttaaatggttcgatataaaggagaaggaaaatgaacatcgggaatatagaatatacttcataaaagaaaattctatatattcgttcgatacaaaatctaaacaaactcgtagctcgcaagtcgatgcgcgactattttcagtaatggtaacttcgaaaccgttatttatagcagatatagggataggagtaggaatgccacaaatgaaaaaaatacttaaaatgtaatcttaatcgagtacaccacacgacaatgaacaaacataagacagattatgctggttatgcttgctgcgtaatatgcggtctaattgttggaattatttttacagcgacactattaaaagttgtagaacgtaaattagttcatacaccatcaatagataaaacgataaaagatgcatatattagagaagattgtcctactgactggataagctataataataaatgtatccatttatctactgatcgaaaaaacctgggaggaaggacgtaatgcatgcaaagctctaaatccaaattcggatctaattaagatagagactccaaacgagttaagttttttaagaagccttagacgaggctattgggtaggagaatccgaaatattaaaccagacaaccccatataattttatagctaaaaatgccacgaagaatggaactaaaaaacggaaatatatttgtagtacaacgaatactcccaaactgcattcgtgttacactatataacaattacactacatttttatcataacactacttcggttagatgttttagaaaaaaataaatatcgccgtaccgttcttgtttttataaaaataacaattaacaattatcaaattttttctttaatattttacgtggttgaccattcttggtggtaaaataatctcttagtgttggaatggaatgctgtttaatgtttccgcactcatcgtatattttgacgtatgcagtcacatcgtttacgcaatagtcagactgtagttctatcatgcttcctacatcagaaggaggaacagttttaaagtctcttggttttaatctattgccattagttttcatgaaatcctttgttttatccacttcacattttaaataaatgtccactatacattcttctgttaattttactagatcgtcatgggtcatagaatttataggttccgtagtccatggatccaaactagcaaacttcgcgtatacggtatcgcgattagtgtatacaccaactgtatgaaaattaagaaaacagtttaataaatcaacagaaatatttaatcctccgtttgatacagatgcgccatatttatggatttcggattcacacgttgtttgtctgaggtgttcgtctagtgttgcttctacgtaaacttcgattcccatatattctttattgtcagaatcgcataccgatttatcatcatacactgtttgaaaactaaatggtatacacatcaaaataataaataataacgagtacattctgcaatattgttatcgtaattggaaaattagtgttcgagtgagtcggattatgtgagtactggattgtatattttattttatattttgtaataagaataaaatgctaatgtcaagtttattccaatagatgtcttattaaaaaacatatataataaataacaatggctgaatggcataaaattatcgaggatatctcaaaaaataataagttcgaggatgccgccatcgttgattacaagactacaaagaatgttctagctgctattcctaacagaacatttgccaagattaatccgggtgaaattattcctctcatcactaatcgtaatattctaaaacctcttattggtcagaaatattgtattgtatatactaactctctaatggatgagaacacgtatgctatggagttgcttactgggtacgcccctgtatctccgatcgttatagcgagaactcataccgcacttatatttttgatgggtaagccaacaacatccagacgtgatgtgtatagaacgtgtagagatcacgctacccgtgtacgcgcaactggtaattaaaataaaaagtaatattcatatgtagtgtcaattttaaatgatgatgatgaaatggataatatccatattgacgatgtcaataatgccggtattggcatacagctcatcgatttttagatttcattcagaggatgtggaattatgttatgggcatttgtattttgataggatctataatgtagtaaatataaaatataatccgcatattccatatagatataattttattaatcgcacgttaaccgtagatgaactagacgataatgtcttttttacacatggttattttttaaaacacaaatatggttcacttaatcctagtttgattgtctcattatcaggaaacttaaaatataatgatatacaatgctcagtaaatgtatcgtgtctcattaaaaatttggcaacgagtacatctactatattaacatctaaacataagacttattctctacatcggtccacgtgtattactataataggatacgattctattatatggtataaagatataaatgacaagtataatgacatctatgattttactgcaatatgtatgctaatagcgtctacattgatagtgaccatatacgtgtttaaaaaaataaaaatgaactcttaattatgctatgctattagaaatggataaaatcaaaattacggttgattcaaaaattggtaatgttgttaccatatcgtataacttggaaaagataactattgatgttacacctaaaaagaaaaaagaaaaggatgtattattagcgcaatcagttgctgtcgaagaggcaaaagatgtcaaggtagaagaaaaaaatattatcgatattgaagatgacgatgatatggatgtagaaagcgcataatacgatctataaaaataagtatataataaatactttttatttacggtactcttgtagtggtgataccctactcaattatttttttaaaaaaatacttattctgattcttctagccatttccgtgttcgttcgaatgccacatcgacgttaaagataggggagtagttgaaatctagttctgcattgttggtacgcacctcaaatgtagtgttggatatcttcaacgtatagttgttgagtagtgatggttttctaaatagaattctcttcatatcattcttgcacgcgtacatttttagcatccatcttggaattctagatccttgttctattcccaatggtttcatcaatagaagattaaacatatcgtacgaacacgatggagagtaatcgtagcaaaagtaagcatttcctttaatcttagatcccggatactggatatattttgcagccaacacgtgcatccatgcagcatttcctacatatacccggctatgcaccgcgtcatcatcgactgtacgatacataatgttaccgtgttgcttacattgctcgtaaaagactttcgtcaatttgtctccttctccgtaaattccagtgggtcttaggcaacaagtatacaattttgctccattcatgattacggaattattggctttcataaccagttgctcggccatacgtttactttttgcgtatacatgtcctggtgatatatcataaagggtatgctcatggccgatgaatggatcaccgtgtttattgggtcctattgcttccatgctactagtatagatcaaatacttgattcctaggtccacacaagctgccaatatagtctgtgttccataatagtttactttcatgatttcattatcggtgtattttccaaatacatccactagagcagccgtatgaataatcagatttaccccatctagcgcttctctcaccttatcaaagtcgtttatatcacattgtatatagtttataaccttaactttcgaggttattggttgtggatcttctacaatatctatgactctgatttcttgaacatcatctgcactaattaacagttttactatatacctgcctagaaatccggcaccaccagtaaccgcgtacacggccattgctgccactcataatatcagactacttattctattttactaaataatggctgtttgtataatagaccacgataatatcagaggagttatttactttgaaccagtccatggaaaagataaagttttaggatcagttattggattaaaatccggaacgtatagtttgataattcatcgttacggagatattagtcaaggatgtgattccataggcagtccagaaatatttatcggtaacatctttgtaaacagatatggtgtagcatatgtttatttagatacagatgtaaatatatttacaattattggaaaggcgttatctatttcaaaaaatgatcagagattagcgtgtggagttattggtatttcttacataaatgaaaagataatacattttcttacaattaacgagaatggcgtttgatatatcagttaatgcgtctaaaacaataaatgcattagtttacttttctactcagcaaaataaattagtcatacgtaatgaagttaatgatacacactacactgtcgaatttgatagggacaaagtagttgacacgtttatttcatataatagacataatgacaccatagagataagaggggtgcttccagaggaaactaatattggttgcgcggttaatacgccggttagtatgacttacttgtataataagtatagttttaaactgattttagcagaatatataagacacagaaatactatatccggcaatatttattcggcattgatgacactagatgatttggctattaaacagtatggagacattgatctattatttaatgagaaacttaaagtagactccgattcgggactatttgactttgtcaactttgtaaaggatatgatatgttgtgattctagaatagtagtagctctatctagtctagtatctaaacattgggaattgacaaataaaaagtataggtgtatggcattagccgaacatatatctgatagtattccaatatctgagctatctagactacgatacaatctatgtaagtatctacgcggacacactgagagcatagaggatgaatttgattattttgaagacgatgattcgtctacatgttctgccgtaaccgacagggaaacggatgtataattttttttatagcgtgaaggatatgataaaaaatataattgttgtatttatcccattccaatcaccttatatgattctgtaaaaaaattatactgtaacacaataaaggagtcttatagatgtatagaggtcagatactggtttgataaactgtttattccacataagtatgtttgactttatggttagacccgcatactttaacaaatcactgaaaattggagttaggtattgacctctcagaatcagttgccgttctggaacattaaatgtattttttatgatatactccaacgcatttatgtgggcatacaacaagtcattactaatggagtattccaagagttttagttgtctagtatttaacaagagaagagatttcaacagactgtttatgaactcgaacgccgcctcattgtcgcttatattgatgatgtcgaattctcccaatatcatcactgatgagtagctcatcttgttatcgggatccaagttttctaaagatgtcattaaaccctcgatcatgaatggatttatcatcatcgtttttatgttggacatgagcttagtccgtttgtccacatctatagacgacgatttctgaattatttcatatatccctctctttaactccaggaacttgtcaggatggtctactttaatatgttctcgtctaagagatgaaaatctttggatggttgcacgcgacttttctttaaaggatgacgttgcccaagatcctctcttaaatgaatccatcttatccttggacaagatggacagtctattttccttagatggtttaatatttttgttacccatgatctataaaggtagacctaatcgtctcggatgaccatatatttattttcagttttattatacgcataaattgtaaaaaatatgttaggtttacaaaaatgtctcgtggggcattaatcgtttttgaaggattggacaaatctggaaaaacaacacaatgtatgaacatcatggaatctataccggcaaacacgataaaatatcttaactttcctcagagatccactgtcactggaaagatgatagatgactatctaactcgtaaaaaaacctataatgatcatatagttaatctattattttgtgcaaatagatgggagtttgcatcttttatacaagaacaactagaacagggaattactttaatagttgatagatacgcattttctggagtagcgtatgccgccgctaaaggcgcgtcaatgactctcagtaagagttatgaatctggattgcctaaacccgacttagttatattcttggaatctggtagcaaagaaattaatagaaacgtcggcgaggaaatttatgaagatgttacattccaacaaaaggtattacaagaatataaaaaaatgattgaagaaggagatattcattggcaaattatttcttctgaattcgaggaagatgtaaagaaggagttgattaagaatatagttatagaggctatacacacggttactggaccagtggggcaactgtggatgtaatagtgaaattacattttttataaatagatgttagtacagtgttataaatggatgaagcatattactctggcaacttggaatcagtactcggatacgtgtccgatatgcataccgaactcgcatcaatatctcaattagttattgccaagatagaaactatagataatgatatattaaacaaggacattgtaaattttatcatgtgtagatcaaacttggataatccatttatctctttcctagatactgtatatactattatagatcaagagatctatcagaccgaattgattaattcattagacgacaatgaaattatcgattgtatagttaacaagtttatgagcttttataaggataacctagaaaatatagtagatgctatcattactctaaaatatataatgaataatccagattttaaaactacgtatgccgaagtactcggttccagaatagccgatatagatattaaacaagtgatacgtaagaatatactacaattgtctaatgatatccgcgaacgatatttgtgaaaaatattaaaaaaaaatactttttttattaaatgacgtcgcttcgcgaatttagaaaattatgctgtgatatatatcacgcatcaggatataaagaaaaatctaaattaattagagactttataacagatagggatgataaatatttgatcattaagctattgcttcccggattagacgatagaatttataacatgaacgataaacaaattataaaattatatagtataatatttaaacaatctcaggaagatatgctacaagatttaggatacggatatataggagacactattaggactttcttcaaagagaacacagaaatccgtccacgagataaaagcattttaactttagaagaagtggatagttttttaactacgttatcatccgtaactaaagaatcgcatcaaataaaattattgactgatgtagcatctgtttgtacatgtaatgatttaaaatgtgtagtcatgcttattgataaagatctaaaaattaaagcgggccctcggtacgtacttaacgctattagtcctcatgcctatgatgtgtttagaaaatctaataacttgaaagagataatagaaaatgcatctaaacaaaatctagactctatatctatttctgttatgactccaattaatcccatgttagcggaatcgtgtgattctgtcaataaggcgtttaaaaaatttccatcaggaatgtttgcggaagtcaaatacgatggtgaaagagtacaagttcataaaaataataacgagtttgccttctttagtagaaacatgaaaccagtactctctcataaagtggattatctcaaagaatacataccgaaagcatttaaaaaagctacgtctatcgtattggattctgaaattgttcttgtagacgaacataatgtaccgctaccgtttggaagtttaggaatacacaaaaagaaagaatataaaaactctaacatgtgtttgttcgtgtttgactgtttgtactttgatggattcgatatgacggacattccattgtacgaacgaagatcttttctcaaagatgttatggttgaaatacccaatagaatagtattctcagagttgacgaatattagtaacgagtctcagttaactgacgtattggatgatgcactaacgagaaaattagaaggattggtcttaaaagatattaatggagtatacgaaccgggaaagagaagatggttaaaaataaagcgagactatttgaacgagggttccatggcagattctgccgatttagtagtactaggtgcctactatggtaaaggagcaaagggtggtatcatggcagtctttctaatgggttgttacgacgatgaatccggtaaatggaagacggttaccaagtgttcaggacacgatgataatacgttaagggagttgcaagaccaattaaagatgattaaaattaacaaggatcccaaaaaaattccagagtggttagtagttaataaaatctatattcccgattttgtagtagaggatccgaaacaatctcagatatgggaaatttcaggagcagagtttacatcttccaagtcccataccgcaaatggaatatccattagatttcctagatttactaggataagagaggataaaacgtggaaagaatctactcatctaaacgatttagtaaacttgactaaatcttaatagttacatacaaactgaaaattaaaataacaccatttagttggtggtcgccatggatggtgttattgtatactgtctaaacgcgttagtaaaacatggcgaggaaataaatcatataaaaaatgatttcatgattaaaccatgttgtgaaagagtttgtgaaaaagtcaagaacgttcacattggcggacaatctaaaaacaatacagtgattgcagatttgccatatatggataatgcggtatccgatgtatgcaattcactgtataaaaagaatgtatcaagaatatccagatttgctaatttgataaagatagatgacgatgacaagactcctactggtgtatataattattttaaacctaaagatgttattcctgttatcatatctataggaaaggataaagatgtctgtgaactattaatctcatcagacatatcgtgtgcatgcgtggagttaaattcatatcacgtagccattcttcccatgaatgtttccttttttaccaaaggaaatgcctcgttgattattctcctgtttgatttctctatcgatgcagcacctctcttaagaagtgtaaccgataataatgttattatatctagacaccagcgtctacatgacgagcttccgagttccaattggttcaagttttacataagtataaagtccgactattgttctatattatatatggttgttgatggatctgtgatgcatgcgatagctgataatagaactcacgcaattattagcaaaaatatattagacaatactacaattaacgatgagtgtagatgctgttattttgaaccacagattaggattcttgatagagatgagatgctcaatggatcatcgtgtgatatgaacagacattgtattatgatgaatttacctgatgtaggcgaatttggatctagtatgttggggaaatatgaacctgacatgattaagattgctctttcggtggctggtaatttaataagaaatcgagactacattcccgggagacgaggctatagctactacgtttacggtatagcctctagataatttttttaagcacgaaataaaaaacataattttaaaccaatctatttcatactattttgtgtgatcaccatggacataaagatagatattagtatttctggtgataaatttacggtgactactaggagggaaaatgaagaaagaaaaaaatatctacctctccaaaaagaaaaaactactgatgttatcaaacctgattatcttgagtacgatgacttgttagatagagatgagatgtttactattctagaggaatattttatgtacagaggtctattaggcctcagaataaaatatggacgactctttaacgaaattaaaaaattcgacaatgatgcggaagaacaattcggtactatagaagaactcaagcagaaacttagattaaattctgaagagggagcagataactttatagattatataaaggtacaaaaacaggatatcgtcaaacttactgtatacgattgcatatctatgataggattgtgtgcatgcgtggtagatgtttggagaaatgagaaactgttttctagatggaaatattgtttacgagcgattaaactgtttattaatgatcacatgcttgataagataaaatctatactgcagaatagactagtatatgtggaaatgtcatagaaagttaatgagagcaaaaatatataaggttgtattccatatttgttattttttctgtaatagttaaaaaaatacattcgatggtctatctatcagattattatgtgttataaggtactttttctcataataaactagagtatgagtaagatagtgtttttcaaaacatataaatctaaaattgatggatgagatatacagctattaatttcgaaaatatataaatctaaaattgatggataagatatacagctattaatttcgaaaatatattttaatctgataactttaaacatggatttttgatggtggtttaacgttttaaaaaaagattttgttattgtagtatatgataatattaaaagatggatataaagaatttgctgactgcatgtactattttttacattactacattggctacggcagatatacctactccgccaccaacgggtcatgtgacaagggagaatatcttgataagaggcataatcaatgttgtaatcggtgtccacctggagaatttgccaaggttagatgtaatggtaacgataacacaaaatgtgaacgctgcccacctcatacatataccacaatccccaattattctaatggatgtcatcaatgtagaaaatgcccaaccggatcatttgataaggtaaagtgtaccggaacacagaacagtaaatgttcgtgtcttcctggttggtattgcgctactgattcttcacagactgaagattgttgaaattgtgtaccaaaaaggagatgtccatgcggatactttggtggaatagatgaacaaggaaatcctatttgtaaatcgtgctgtattggtgaatattgcaactacctacgtaattatagacttgatccattttctccatgcaaactatctaaatgtaattaattatgattttgatgataatgttaccatacattatatcgctacttggttagtgtattattcagtatgaagacctattaataattacttatcttttgacgatcttgttataattataatataaaaacttatggcatagtaactcataattgctgacgcgataaattcgtaataatctgttttgttcaaatttttataaggaatctacaggcataaaaataaaaatataatttataatatactcttacagcgcgccatcatgaatagcagcagtaaattaattgctgttattaatggatttagaaatagtggacgattttgtgatattaatatagttattaatgatgaaaggataaacgctcacagactcatcctatctggagcctccgaatatttttccattctgttttccaataattttatcgattctaatgaatacgaagttaatctaagtcatttagattatcaaagtgttaacgatttgatcgattacatttatgggatacctttgagcctaactaacgataacgtgaaatatattctttcaaccgctgattttttacaaattggatctgccattactgagtgcgaaaaatacatacttaaaaatctttgttctagaaactgtatcgatttctacatatacgctgataaatataataacaagaaaatagaatcagcgtcgtttaacacaatattacgaaatattttgagactcatcaacgatgaaaactttaaatacttaacagaggaatcaatgataaaaattttaagcgatgatatgttaaatataaaaaatgaggattttgcaccactaattctcattaaatggttagagagtactcaacaatcatgcaccgtcgagttacttagatgcctcagaatatcattgctttccccacaagttataaaatcactttatagtcatcaactggttagttcaatctacgaatgtataacattcttaaacaatatagcattcttggatgaatcatttcctagataccatagcatcgagttgatatctatcggtataagtaattcgcatgataagatttccataaactgctacaatcataaaaaaaatacatgggaaatgatatcttcacgtagatataggtgtagtttcgcagtggccgtcctggataatattatctatatgatgggtggatatgatcagtccccgtatagaagttcaaaggttatagcgtacaatacatgtacaaattcttggatatatgatataccagagctaaaatatcctcgttctaattgtgggggactggctgatgacgaatacatttattgtataggcggcatacgcgatcaggattcatcgttgacatctagtattgatagatggaagccatcaaaaccatattggcagaagtatgctaaaatgcgcgaaccaaaatgtgatatgggggttgcgatgttaaacggattaatatatgtcatgggtggaatcgttaaaggtgacacgtgtaccgacgcactagagagtttatcagaagatggatggatgaagcatcaacgtcttccaataaaaatgtccaatatgtcgacgattgttcatgatggcaagatttatatatctggaggttacaacaatagtagtgtagttaatgtaatatcgaatctagtccttagctataatccgatatatgatgaatggaccaaattatcatcattaaacattcctagaattaatcccgctctatggtcagcgcataataaattatatgtaggaggaggaatatctgatgatgttcgaactaatacatctgaaacatacgataaagaaaaagattgttggacattggataatggtcacgtgttaccacgcaattatataatgtataaatgcgaaccgattaaacataaatatccattggaaaaaacacagtacacgaatgattttctaaagtatttggaaagttttataggtagttgatagaacaaaatacataattttgtaaaaataaatcactttttatactaatatgacacgattaccaatacttttgttactaatatcattagtatacgctacaccttttcctcagacatctaaaaaaataggtgatgatgcaactctatcatgtaatcgaaataatacaaatgactacgttgttatgagtgcttggtataaggtaccaaaaattgaaaataaatacaaaggttcttgagggttgtgttaaattgaaagcgagaaataatcataaatactgcagaccatgaagagcgccgttctcttcctcctggggatcattttccttgaacaatgcggtgttcgggggacacttgttattaggaacgcacgatgctcctgtattagcacctccagaggaacgatacattacaagtcactcaaagacttgaaacaattcgcgccctcccctaattgcaataagacagagataattgcgacattgaaaaacggggaccaaacttgtcttgatcctgacagcgccaatgtaaaaaaactcatgaaggagtgggaaaaaaaaattagtcaaaaaaaaaaacagaagcgcggtaagaaacaccaaaaaaacatgaaaaataggaagcctaaaacacctcaaagccgccgaaggtctcggaaaacaacctgattaattaatttttattagtagaatttcattttgtttttttctatgctataaataccatgtgtccacaaaagcttacgatctcatggttcgccattgtcctcctggtttcacctctgatggcgatgtgggagctggaaaaagacgtctatgtagtcgaagttgactggactccagatgcgcctggggagacggtcaatctcacttgcgacaccccggaagaagatgacatcacctggaccagcgatcagcggcatggtgttattggaagtggcaaaactctcacaatcacggttaaggagttcctggatgctgggcagtatacgtgccataagggaggggaaacgttgtctcattcccacctgttgctgcacaagaaggagaacggaatttggtctaccgaaattcttaagaattttaagaacaaaacttttcttaaatgcgaggcaccgaattattccgggaggtttacgtgttcctggcttgttcagcggaatatggaccttaaatttaacattaaaagtagcagcagctctccagactcacgagcagtcacgtgtggaatggcttcactttccgcagaaaaagttactcttgatcagcgggattacgaaaagtatagtgtctcttgccaagaggacgtaacttgtccgaccgcagaggagacgctccccatagagctggccctcgaagcaagacaacagaataagtatgaaaattatagtaccagtttcttcattagggatatcataaaaccagacccacccaaaaaccttcaaatgaaaccactgaagaattctcaagtagaagtcagctgggagtatcctgacagttggagcactccgcacagctattttagccttaagttcttcgttcgaatccaacgaaagaaggaaaaaatgaaagagacggaagaaggttgcaaccagaagggtgcctttctggttgaaaaaacatccacagaagttcaatgtaaaggagggaacgtatgcgtacaagcacaagataggtattacaatagttcatgcagtaagtgggcatgtgtgccctgccgggttcgcagcggtggcggtggaagtggaggcggcgggagcggcggtgggggatctagagtaatccctgtcagtggcccagcacgatgcctctcacagtctcggaacctgttgaaaactactgacgatatggtaaaaacggcacgagaaaagttgaaacattactcttgcacagccgaagatatcgaccatgaagacataacccgggatcaaacgtcaacgttgaaaacttgtctccctctcgaacttcacaagaatgaatcctgtctggccacgagggagacgtctagtacgacgcggggttcatgccttcccccccaaaaaacatcacttatgatgacgctgtgtctgggctctatctacgaggacctcaaaatgtatcaaacggagtttcaagcgataaacgcagcgcttcagaaccataaccaccagcagattatactcgataagggaatgctcgtagccattgatgaactgatgcaatcccttaaccataacggggagacattgcgacagaagcctcccgtcggagaagccgacccgtaccgcgttaaaatgaagctgtgtatccttctgcatgcattttcaacccgagtcgtcacgataaacagggtcatggggtatctttcaagcgcgtgattaattaagagctcatgcggatctttatgatacgtacaatgataatgatacagtaccaccaactactgtaggcggtagtacaacctctattagcaattataaaaccaaggactttgtagaaatatttggtattaccgcattaattatattgtcggccgtggcaatattctgtattacatattatatatataataaacgttcacgtaaatacaaaacagagaacaaagtctagatttttgacttacataaatgtctgggatagtaaaatctatcatattgagcggaccatctggttcaggaaagacagccatagccaaaagactatgggaatatatttggatttgtggtgtcccataccactagatttcctcgtcctatggaacgagaaggtgtcgattaccattacgttaacagagaggccatctggaagggaatagccgccggaaactttctagaacatactgagtttttaggaaatatttacggaacttctaaaactgctgtgaatacagcggctattaataatcgtatttgtgtgatggatctaaacatcgatggcgttagaagtcttaaaaatacgtacctaatgccttactcggtgtatataagacctacctctcttaaaatggttgagaccaagcttcgttgtagaaacactgaagcggatgatgagattcatcgtcgtgtgatgttggcaaaaactgacatggatgaggcaggtgaagccggtctattcgacactattatcattgaagatgatgtgaatttagcatatagtaagttaattcagatactacaggaccgtattagaatgtattttaacactaattagagacttaagacttaaaacttgataattaataatataactcgtttttatatgtggctatttcaacgtctaatgtattagttaaatattaaaacttaccacgtaaaacttaaaatttaaaatgatatttcattgacagatagatcacacattatgaactttcaaggacttgtgttaactgacaattgcaaaaatcaatgggtcgttggaccattaataggaaaaggtggattcggtagtatttatactactaatgacaataattatgtagtaaaaatagagcccaaagctaacggatcattatttaccgaacaggcattttatactagagtacttaaaccatccgttatcgaagaatggaaaaaatctcacaatataaagcacgtaggtcttatcacgtgcaaggcatttggtctatacaaatccattaatgtggaatatcgattcttggtaattaatagattaggtgcagatctagatgcggtgatcagagccaataataatagattaccaaaaaggtcggtgatgttgatcggaatcgaaatcttaaataccatacaatttatgcacgagcaaggatattctcacggagatattaaagcgagtaatatagtcttggatcaaatagataagaataaattatatctagtggattacggattggtttctaaattcatgtctaatggcgaacatgttccatttataagaaatccaaataaaatggataacggtactctagaatttacacctatagattcgcataaaggatacgttgtatctagacgtggagatctagaaacacttggatattgtatgattagatggttgggaggtatcttgccatggactaagatatctgaaacaaagaattgtgcattagtaagtgccacaaaacagaaatatgttaacaatactgcgactttgttaatgaccagtttgcaatatgcacctagagaattgctgcaatatattaccatggtaaactctttgacatattttgaggaacccaattacgacgagtttcggcacatattaatgcagggtgtatattattaagtgtggtgtttggtcgatgtaaaatttttgtcgataaaaattaaaaaataacttaatttattattgatctcgtgtgtacaaccgaaatcatggcgatgttttacgcacacgctctcggtgggtacgacgagaatcttcatgcctttcctggtacctgcagcggccgctcgagagctcctggtaaaagttaaacttggggagaatgatacagaaaatctttcttctactatatcggcggcaccatcgaggtaaccacctctcaagaagaccgcgtgaataatgtactcatgaaacgtttggaaactatacgccatatgtggtctgttgtatatgatcattttgatattgtgaatggtaaagaatgctgttatgtgcatacgcattcatctaatcaaaatcctataccgagtactgtaaaaacaaatttgtacatgaagactatgggatcatgcattcaaatggattccatggaagctctagagtatcttagcgaactgaaggaatcaggtggatggagtcccagaccagaaatgcaggaatttgaatatccagatggagtggaagacactgaatcaattgagagattggtagaggagttcttcaatagatcagaacttcaggctggtaaattagtcaaatttggtaattctattaattgttaaacatacatctgtttcagctaagcaactaagaacacgtatacggcagcagcttccttttatactctcatcttttaccaacacaaagggtggatatttgttcattggagttgataataatacacacaaagtatttggattcacggtgggttacgactacctcagactgatagagaatgatatagaaaagcatatcaaaagactttgtgttgtgcatttctgtgagaagaaagaggacatcaagtacacgtgtcgattcatcaaggtatataaacctggggatgaggctacctcgacatacgtgtgcgctatcaaagtggaaagatgctgttgtgctgtgtttgcagattggccagaatcatggtatatggatactaatggtatcaagaagtattctccagatgaatgggtgtcacatataaaattttaattaatgtaactatagagaacaaataataggttgtaatatcatatagacaataactaacaattaattagtaactgttatctcttttttaactaaccaactaactatatacctattaatacatcgtaattatagttcttaacatctattaatcattgattcgcttctttaattttttataaactaacattgttaattgaaaagggataacatgttacagaatataaattatatatggatttttttaaaaaggaaatacttgactggagtgtatatttatctcttcattatatagcacgcgtgtgttccaattcttccacatcccatataatacaggattataatctcgttcgaacatacgagaaagtggataaaacaatagttgattttttatctaggttgccaaatttattccatattttagaatatggggaaaatattctacatatttattctatggatgatgctaatacgaatattataattttttttctagatagagtattaaatattaataagaacgggtcatttatacacaatctcaggttatcatcatccattaatataaaagaatatgtatatcaattagttaataatgatcatccagataataggataagactaatgcttgaaaatggacgtagaacaagacattttttgtcctatatatcagatacagttaatatctatatatgtattttaataaatcatggattttatatagatgcagaagacagttacggttgtacattattacatagatgtatatatcactataagaaatcagaatcagaatcatacaatgaattaattaagatattgttaaataatggatccgatgtagataaaaaagatacgtacggaaacacaccttttatcctattatgtaaacacgatatcaacaacgtggaattgtttgagatatgtttagagaatgctaatatagactctgtagactttaatagatatacacctcttcattatgtctcatgtcgtaataaatatgattttgtaaagttattaatttctaaaggagcaaatgttaatgcgcgtaataaattcggaactactccattttattgtggaattatacacggtatctcgcttataaaactatatttggaatcagacacagagttagaaatagataatgaacatatagttcgtcatttaataatttttgatgctgttgaatctttagattatctattatccagaggagttattgatattaactatcgtactatatacaacgaaacatctatttacgacgctgtcagttataatgcgtataatacgttggtctatctattaaacagaaatggtgattttgagacgattactactagtggatgtacatgtatttcggaagcagtcgcaaacaacaacaaaataataatggaagtactattgtctaaacgaccatctttgaaaattatgatacagtctatgatagcaattactaaaaataaacaacataatgcagatttattgaaaatgtgtataaaatatactgcgtgtatgaccgattatgatactcttatagatgtacagtcgctacagcaatataaatggtatattttaaaatgtttcgatgaaatagatatcatgaagagatgttatataaaaaataaaactgtattccaattagttttttgtatcaaagacattaatactttaatgagatatggtaaacatccttctttcgtgaagtgcactagtctcgacgtatacggaagtcgtgtacgtaatatcatagcatctattagatatcgtcagagattaattagtctattatccaagaagctggatgcgggagataaatggtcgtgttttcctaacgaaataaaatataaaatattggaaaactttaacgataacgaactatccacatatctaaaaatcttataaacactattaaaatataaaatctaagtaggataaaatcacactacatcattgtttccttttagtgctcgacagtgtatactatttttaacactcataaataaaaatgaaaacgatttccgttgttacgttgttatgcgtactacctgctgttgtttattcaacatgtactgtacccactatgaataacgctaaattaacgtctaccgaaacatcgtttaatgataaacagaaagttacatttacatgtgatcagggatatcattctttggatccaaatgctgtctgcgaaacagataaatggaaatacgaaaatccatgcaagaaaatgtgcacagtttctgattatgtctctgaattatatgataagccattatacgaagtgaattccaccatgacactaagttgcaacggcgaaacaaaatattttcgttgcgaagaaaaaaatggaaatacttcttggaatgatactgttacgtgtcctaatgcggaatgtcaacctcttcaattagaacacggatcgtgtcaaccagttaaagaaaaatactcatttggggaatatatgactatcaactgtgatgttggatatgaggttattggtgcttcgtacataagttgtacagctaattcttggaatgttattccatcatgtcaacaaaaatgtgatataccgtctctatctaatggattaatttccggatctacattttctatcggtggcgttatacatcttagttgtaaaagtggttttatactaacgggatctccatcatccacatgtatcgacggtaaatggaatcccatactcccaacatgtgtacgatctaacgaaaaatttgatccagtggatgatggtcccgacgatgagacagatttgagcaaactctcgaaagacgttgtacaatatgaacaagaaatagaatcgttagaagcaacttatcatataatcatagtggcgttaacaattatgggcgtcatatttttaatctccgttatagtattagtttgttcctgtgacaaaaataatgaccaatataagttccataaattgctaccgtaaatataaatccgttaaaataattaataatttaataacaaacaagtatcaaaagattaaagacttatagctagaatcaattgagatgtcttcttcagtggatgttgatatctacgatgccgttagagcatttttactcaggcactattataacaagagatttattgtgtatggaagaagtaacgccatattacataatatatacaggctatttacaagatgcgccgttataccgttcgatgatatagtacgtactatgccaaatgaatcacgtgttaaacaatgggtgatggatacacttaatggtataatgatgaatgaacgcgatgtttctgtaagcgttggcaccggaatactattcatggaaatgtttttcgattacaataaaaatagtatcaacaatcaactaatgtatgatataattaatagcgtatctataattctagctaatgagagatatagaagcgcttttaacgacgatggtatatacatccgtagaaatatgattaacaagttgtacggatacgcatctctaactactattggcacgatcgctggaggtgtttgttattatctgttgatgcatctagttagtttgtataaataattatttcaatatactagttaaaattttaagattttaaatgtataaaaaactaataacgtttttatttgtaataggtgcattagcatcctattcgaataatgagtacactccgtttaataaactgagtgtaaaactctatatagatggagtagataatatagaaaattcatatactgatgataataatgaattggtgttaaattttaaagagtacacaatttctattattacagagtcatgcgacgtcggatttgattccatagatatagatgttataaacgactataaaattattgatatgtataccattgactcgtctactattcaacgcagaggtcacacgtgtagaatatctaccaaattatcatgccattatgataagtacccttatattcacaaatatgatggtgatgagcaacaatattctattactgcagagggaaaatgctataaaggaataaaatatgaaataagtatgatcaacgatgatactctattgagaaaacatactcttaaaattggatctacttatatatttgatcgtcatggacatagtaatacatattattcaaaatatgatttttaaaaatttaaaatatattatcacttcagtgacagtagtcaaataacaaacaacaccatgagatatattataattctcgcagttttgttcattaatagtatacacgctaaaataactagttataagtttgaatccgtcaattttgattccaaaattgaatggactggggatggtctatacaatatatcccttaaaaattatggcatcaagacgtggcaaacaatgtatacaaatgtaccagaaggaacatacgacatatccgcatttccaaagaatgatttcgtatctttctgggttaaatttgaacaaggcgattataaagtggaagagtattgtacgggactatgcgtcgaagtaaaaattggaccaccgactgtaacattgactgaatacgacgaccatatcaatttgtacatcgagcatccgtatgctactagaggtagcaaaaagattcctatttacaaacgcggtgacatgtgtgatatctacttgttgtatacggctaacttcacattcggagattctaaagaaccagtaccatatgatatcgatgactacgattgcacgtctacaggttgcagcatagactttgtcacaacagaaaaagtgtgcgtgacagcacagggagccacagaagggtttctcgaaaaaattactccatggagttcgaaagtatgtctgacacctaaaaagagtgtatatacatgcgcaattagatccaaagaagatgttcccaatttcaaggacaaaatggccagagttatcaagagaaaatttaataaacagtctcaatcttatttaactaaatttctcggtagcacatcaaatgatgttaccacttttcttagcatgcttaacttgactaaatattcataactaatttttattaatgatacaaaaacgaaataaaactgcatattatacactggttaacgcccttataggctctaaccattttcaagatgaggtccctgattatagtccttctgttcccctctatcatctactccatgtctattagacgatgtgagaagactgaagaggaaacatggggattgaaaatagggttgtgtataattgccaaagatttctatcccgaaagaactgattgcagtgttcatctcccaactgcaagtgaaggattgataactgaaggcaatggattcagggatatacgaaacaccgataaattataaaaaaagcaatgtgtccgctgtttccgttaataatactattttcgtaactggcggattattcataaataactctaatagcacgatcgtggttaacaatatggaaaaacttgacatttataaagacaaacaatggtcgattatagaaatgcctatggctagggtatatcacggcatcgactcgacatttggaatgttatattttgccggaggtctatccgttaccgaacaatatggtaatttagagaaaaacaacgagatatcttgttacaatcctagaacgaataagtggtttgatatttcatatactatttataagatatccatatcatcattgtgtaaactaaataacgtcttctatgtatttagtaaggacattggatatgtggaaaagtatgatggtgcatggaagttagtacatgatcgtctccccgctataaaggcattatcaacttctccttattgattgaaaatgaaaatataaatagtttttatgtatagcagtattaccctatagttttattgcttactactaacatggatacagatgttacaaatgtagaagatatcataaatgaaatagatagagagaaagaagaaatactaaaaaatgtagaaattgaaaataataaaaacattaacaagaatcatccaagtggatatattagagaagcactcgttattaatacaagtagtaatagtgattccattgataaagaagttatagaatgtatcagtcacgatgtaggaatatagatcatatctactaatttttataatcgatacaaaacataaaaaacaactcgttattacatagcaggcatggaatccttcaagtattgttttgataacgatggcaagaaatggattatcggaaatactttatattctggtaattcaatactatataaggtcagaaaaaatttcactagttcgttctacaattacgtaatgaaaatagatcacaaatcacacaagccattgttgtctgaaatacgattctatatatctgtattggatcctttgactatcgacaactggacacgggaacgtggtataaagtatttggctattccagatctgtatggaattggagaaaccgatgattatatgttcttcgttataaagaattcgggaagagtattcgccccaaaggatactgaatcagtcttcgaagcatgcgtcactatgataaacacgttagagtttatacactctcgaggatttacccatggaaaaatagaaccgaggaatatactgattagaaataaacgtctttcactaattgactattctagaactaacaaactatacaagagtggaaactcacatatagattacaacgaggacatgataacttcaggaaatatcaattatatgtgtgtagacaatcatcttggagcaacagtttcaaaacgaggagatttagaaatgttgggatattgcatgatagaatggttcggtggcaaacttccatggaaaaacgaaagtagtataaaagtaataaaacaaaaaaaagaatataaaaaatttatagctactttctttgaggactgttttcctgaaggaaatgaacctctggaattagttagatatatagaattagtatacacgttagattattctcaaactcctaattatgacagactacgtaaactgtttatacaagattgaaattatattctttttttatagagtgtggtagtgttacggatatctaatattaatattagactatctctatcgcgctacacgaccaatatcgattactatggatatcttcagggaaatcgcatcttctatgaaaggagagaatgtattcatttctccagcgtcaatctcgtcagtattgacaatactgtattatggagctaatggatccactgctgaacagctatcaaaatatgtagaaacggaggagaacacggataaggttagcgctcagaatatctcattcaaatccatgaataaagtatatgggcgatattctgccgtgtttaaagattcctttttgagaaaaattggcgataagtttcaaactgttgacttcactgattgtcgcactatagatgcaatcaacaagtgtgtagatatctttactgaggggaaaatcaatccactattggatgaaccattgtctcctgatacctgtctcctagcaattagtgccgtatactttaaagcaaaatggttgatgccattcgaaaaggaatttaccagtgattatcccttttacgtatctccgacggaaatggtagatgtaagtatgatgtctatgtacggcaaggcatttaatcacgcatctgtaaaggaatcattcggcaacttttcaatcatagaactgccatatgttggagatactagtatgatggtcattcttccagacaagattgatggattagaatccatagaacaaaatctaacagatacaaattttaagaaatggtgtaactctctggaagctacgtttatcgatgttcacattcccaagtttaaggtaacaggttcgtataatcttgtggatactctagtaaagtcaggactgacagaggtgttcggttcaactggagattatagcaatatgtgtaattcagatgtgagtgtcgacgctatgattcacaaaacgtatatagatgtcaatgaagagtatacagaagcagctgcagcaacttgtgcactggtgtcagactgtgcatcaacaattacaaatgagttctgtgtagatcatccgttcatctatgtgattaggcatgttgatggaaaaattcttttcgttggtagatattgctctccgacaactaattgttaaccattttttttaaaaaaatagaaaaaacatgtggtattagtgcaggtcgttgttcttccaattgcaattggtaagatgacggccaactttagtacccacgtcttttcaccacagcactgtggatgtgacagactgaccagtattgatgacgtcagacaatgtttgactgaatatatttattggtcgtcctatgcataccgcaacaggcaatgcgctggacagttgtattccacactcctctcttttagagatgatgcggaatcagtgttcatcgacattcgcgagctggtaaaaaatatgccgtgggatgatgtcaaagattgtacagaaatcatccgttgttatataccggatgagcaaaaaaccatcagagagatttcggccatcatcggactttgtgcatatgctgctacttactggggaggtgaagaccatcccactagtaacagtctgaacgcattgtttgtgatgcttgagatgctcaattacgtggattataacatcatattccggcgtatgaattgatgagttgtacatcttgacattttctttcttctcttctccctttcttctcttctcccttcctccctcttctccctttcccagaaacaaacttttttacccactataaaataaaatgagtatactacctattatatttcttcctatatttttttattcttcattcgttcagacttttaacgcgcctgaatgtatcgacaaagggcaatattttgcatcattcatggagttagaaaacgagccagtaatcttaccatgtcctcaaataaatacgctatcatccggatataatatattagatattttatgggaaaaacgaggagcggataatgatagaattataccgatagataatggtagcaatatgctaattctgaacccgacacaatcagactctggtatttatatatgcattaccacgaacgaaacctactgtgacatgatgtcgttaaatttgacaatcgtgtctgtctcagaatcaaatatagatcttatctcgtatccacaaatagtaaatgagagatctactggcgaaatggtatgtcccaatattaatgcatttattgctagtaacgtaaacgcagatattatatggagcggacatcgacgccttagaaataagagacttaaacaacggacacctggaattattaccatagaagatgttagaaaaaatgatgctggttattatacatgtgttttagaatatatatacagaggtaaaacatataacgtaaccagaattgtaaaattagaggtacgggataaaataataccttctactatgcaattaccagatggcattgtaacttcaataggtagtaatttgactattgcgtgtagagtatcgttgagacctcccacaacggatgcagacgtcttttggataagtaatggtatgtattacgaagaagatgatggggacggagacggtagaataagtgtagcaaataaaatctatatgaccgataagagacgtgttattacatcccggttaaacattaatcctgtcaaggaagaagatgctacaacgtttacgtgtatggcgtttactattcctagcatcagcaaaacagttactgttagtataacgtgaatgtatgttgttacatttccatgtcaattgagtttataagaatttttatacattatcttccaacaaacaattgacgaacgtattgctatgattaactcccacgatactatgcatattattaatcattaacttgcagactatacctagtgctattttgacatactcatgttcttgtgtaattgcggtatctatattattaaagtacgtaaatctagctatagttttattatttaattttagataatataccgtctccttatttttaaaaattgccacatcctttattaaatcatgaatgggaatttctatgtcatcgttagtatattgtgaacaacaagagcagatatctataggaaagggtggaatgcgatacattgatctatgtagttttaaaacacacgcgaactttgaagaatttatataaatcattccatcgatacatccttctatgttgacatgtatatatccaggaattcttttattaatgtcaggaaatgtataaactaaaacattgcccgaaagcggtgcctctatctgcgttatatccgttcttaacttacaaaatgtaaccaatacctttgcatgacttgttttgttcggcaacgttagtttaaacttgacgaatggattaattacaatagcatgatccgcgcatctattaagtttttttactttaacgcccttgtatgtttttacagagactttatctaaatttctagtacttgtatgtgttataaatataacgggatatagaactgaatcacctaccttagatacccaattacattttatcagatccagataataaacaaattttgtcgccctaactaattctatattgttatatattttacaattggttatgatatcatgtaataacttggagtctaacgcgcatcgtcgtacgtttatacaattgtgatttagtgtagtatatctacacatgtatttttccgcactatagtattctggactagtgataaaactatcgttatatctgtcttcaatgaactcatcgagatattgctctctgtcatattcatacacctgcataaactttctagacatcttacaatccgtgttattttaggatcatatttacatatttacgggtatatcaaagatgttagattagttaatgggaatcgtctataataatgaatattaaacaattatatgaggacttttaccacaaagcatcataaaaatgagtcgtcgtctgatttatgttttaaatatcaaccgcaaatcaactcataaaatacaagagaatgaaatatatacatattttagtcattgcaatatagaccatacttctacagaacttgattttgtagttaaaaactatgatctaaacagacgacaacatgtaactgggtatactgcactacactgctatttgtataataattactttacaaacgatgtactgaagatattattaaatcatgacgtaaatgtaacgatgaaaaccagtagcggacgtatgcctgtttatatattgcttactagatgttgcaatatttcacatgatgtagtgatagatatgatagacaaagataaaaaccacttattacatagagactattccaacctattactagagtatataaaatctcgttacatgttattaaaggaagaggatatcgatgagaacatagtatccactttattagataagggaatcgatcctaactttaaacaagacggatatacagcgttacattattattatttgtgtctcgcacacgtttataaaccaggtgagtgtagaaaaccgataacgataaaaaaggccaagcgaattatttctttgtttatacaacatggagctaatctaaacgcgttagataattgtggtaatacaccattccatttgtatcttagtattgaaatgtgtaataatattcatatgactaaaatgctgttgacttttaatccgaatttcaaaatatgtaataatcatggattaacgcctatactatgttatataacttccgactacatacaacacgatattcttgttatgttaatacatcactatgaaacaaatgttggagaaatgccgatagatgagcgtcgtatgatcgtattcgagtttatcaaaacatattctacacgtccggcagattcgataacttatttgatgaataggtttaaaaatataaatatttatacccgctatgaaggaaagacattattacacgtagcatgtgaatataataatacacacgtaatagattatcttatacgtatcaacggagatataaatgcgttaaccgacaataacaaacacgctacacaactcattatagataacaaagaaaattccccgtataccatcgattgtttactgtatatacttagatatattgtagataagaatgtgataagatcgttggtggatcaacttccatctctacctatcttcgatataaaatcatttgagaaattcatatcctactgtatacttttagatgacacattttacgataggcacgttaagaatcgcgattctaaaacgtatcgatacgcattttcaaaatacatgtcgtttgataaatacgatggtataataactaaatgtcacgacgaaacaatgttactcaaactgtccactgttctagacactacactatatgcagttttaagatgccataattcgaaaaagttaagaagatacctcaacgagttaaaaaaatataataacgataagtcctttaaaatatattctaatattatgaatgagagataccttaatgtatattataaagatatgtacgtgtcaaaggtatatgataaactatttcctgttttcacagataaaaattgtctactaacattactaccttcagaaattatatacgaaatattatacatgctgacaattaacgatctttataatatatcgtatccacctaccaaagtatagttgtatttttctcatgcgatgtgtgtaaaaaaactgatattatataaatattttagtgccgtataataaagatgacgatgaaaatgatggtacatatatatttcgtatcattattgttattgctattccacagttacgccatagacatcgaaaatgaaatcacagaattcttcaataaaatgagagatactctaccagctaaagactctaaatggttgaatccagcatgtatgttcggaggcacaatgaatgatatagccgctctaggagagccattcagcgcaaagtgtcctcctattgaagacagtcttttatcgcacagatataaagactatgtggttaaatgggagaggctagaaaagaatagacggcgacaggtttctaataaacgtgttaaacatggtgatttatggatagccaactatacatctaaattcagtaaccgtaggtatttgtgtaccgtaactacaaagaatggtgactgtgttcagggtatagttagatctcatattaaaaaacctccttcatgcattccaaaaacatatgaactaggtactcatgataagtatggcatagacttatactgtggaattctttacgcaaaacattataataatataacttggtataaagataataaggaaattaatatcgacgacattaagtattcacaaacgggaaagaaattaattattcataatccagagttagaagatagtggaagatacaactgttacgttcattacgacgacgttagaatcaagaatgatatcgtagtatcaagatgtaaaatacttacggttataccgtcgcaagaccacaggtttaaactaatactagatccaaaaatcaacgtaacgataggagaacctgccaatataacatgcactgctgtgtcaacgtcattattgattgacgatgtactgattgaatgggaaaatccatccggatggcttataggattcgattttgatgtatactctgttttaactagtagaggcggtattaccgaggcgaccttgtactttgaaaatgttactgaagaatatataggtaatacatataaatgtcgtggacacaactattattttgaaaaaacccttacaactacagtagtattggagtaaatacacaatgcatttttatatacattactgaataattattattattatttatatcgtatttgtgctataacgcgactatctaggtatttgtatctcactgatagagaacatataaatatagactctattaaacagttgtgtaaaatatcaaatcctaatagatgtggatgtacggctttacatgagtacttttataattatagatcagtcaacggaaaatacaagtatagatacaacggttactatcaatattatttatctagcgattatgaaaattataatgaatattattatgatgattatgatagaactggtatgaacagtgagagtgataatatatcaatcaaaacagaatatgaattctatgatgaaacacaagatcaaagtacacaactagtaggttacgacattaaactcaaaaccaatgaggatgattttatggctatgatagatcagtgggtgtccatgattatatagatgaatcaattaataaagtagtatatggaagagagtctcacgtaagatggcgggatatatggcaagaacataatgatggcgtatacagtataggaaaggagtgcatagataatatatacgaagacaaccataccgtagacgaattctacaagatagacagcgtatcagatgtagatgacgcggaacacatatctccgataactaatgatgtatctacacaaacatgggaaaagaaatcagagttagatagatacatggaaatgtatcctcgtcatagatatagtaagcattctgtctttaagggattttctgacaaagttagaaaaaatgatttagacatgaatgtggtaaaagaattactttctaacggtgcatctctaacaattaaggatagcagtaataaggatccaataaccgtttattttcgaagaacgataatgaatttagaaatgattgatattattaacaaacatacaactattgatgaacgaaagtatatagtacactcctatctaaaaaattataaaaatttcgattatccatttttcaggaagttagttttgactaataaacattgtctcaacaattattataatataagcgacagcaaatatggaacaccgctacatatattggcgtctaataaaaaattaataactcctaattacatgaagttattagtgtataacggaaatgatataaacgcacgaggtgaagatacacaaatgcgaactccattacacaaatatttgtgtaaatttgtatatcataatattgaatatggtatccgatactataatgaaaagattatagacgcatttatagagttaggagccgatctaactattccaaataacgatggaatgataccagtagtttactgtatacactcaaatgcagaatatggttataacaatattactaacataaagataatacgtaaactacttaatcttagtagacgtgcgtcacataatctatttagagatcgagtcatgcacgattatataagtaatacatatattgatcttgagtgtttagatattattagatcgttggatggattcgatatcaatggttactttgaaggacgtacaccacttcattgcgctatacaacataacttcactcagattgctaagtacttattagatcgaggagctgatatagtcgtacccaacacattgattatacatcagtacatacagtaaatagcatagatatggaggaggatacaaatatttcaaataaagttataaggtacaacactgtcaataatatatggaagacattacctaacttctggactggaactataaatccaggcgtggtctcgcataaagatgatatatatgttgtatgcgacatcaaagatgaaaaaaatgttaagacttgtatatttagatataacacgaatacgtataacggatgggaattggttacgacgacagaaagcagattatcagctctgcatactattcttcatgacaataccataatgatgttacattgttatgaatcgtatatgttacaagatacatttaatgtgtacactcgcgaatggaatcatatgtgtcatcaacattcgaatagttatatcatgtacaatatactacccatctactaaatataatagaataaaataaatgagtatgatcattttagataacgattgattttatcattaccgcttcattcttatattctttgcttacggaacctatatttagaaacatctactaacgattttttatgcttgcattattaatggtatgtaatatgattgattgtgtacgcaataccaatttgttaagtatgaatacggggtacaaacataaactgaaatttaacattatttatttatgatatatatcgttatcgttattgtttggtctataccatggatatctttaaagaactaatcttaaaacaccctgatgaaaatgttttgatttctccagtttctattttatctactttatctattctaaatcatggagcagctggttctacagctgaacaactatcaaaatatatagagaatatgaatgagaatacacccgatgataagaaggatgacaataatgacatggacgtagatattccgtattgtgcgacactagctaccgcaaataaaatatacggtagcgatagtatcgagttccacgcctccttcctacaaaaaataaaagacgattttcaaactgtaaactttaataatgctaaccaaacaaaggaactaatcaacgaatgggttaagacgatgacaaatggtaaaattaattccttattgactagtccgctatccattaatactcgtatgacagttgttagcgccgtccattttaaagcaatgtggaaatatccattttctaaacatcttacatatacagacaagttttatatttctaagaatatagttaccagtgttgatatgatggtgggtaccgagaataacttgcaatatgtacatattaatgaattattcggaggattctctattatcgatattccatacgagggaaactctagtatggtaattatactaccggacgacatagaaggtatatataacatagaaaaaaatataacagatgaaaaatttaaaaaatggtgtggtatgttatctactaaaagtatagacttgtatatgccaaagtttaaagtggaaatgacagaaccgtataatctggtaccgattttagaaaatttaggacttactaatatattcggatattatgcagattttagcaagatgtgtaatgaaactatcactgtagaaaaatttctacatacgacgtttatagatgttaatgaggagtatacagaagcatcggccgttacaggagtatttatgactaacttttcgatggtatatcgtacgaaggtctacataaaccatccattcatgtacatgattaaagacaacacaggacgtatactttttatagggaaatactgctatccgcaataaatataaacaaatagacttttatcacgtttatctatgtctaaatattacaaatagtaatagtataaactaaagctgataatacttaaaaaaataataatatcatttacaattaatagtataaactaaaaattaaacaaatcgttattataagtaatatcaaaatgatgatatacggattaatagcgtgtcttatattcgtgacttcatccatcgctagtccactttatattcccgttattccacccattacggaagataaatcgttcaatagtgtagaggtattagtttccttgtttagagatgaccaaaaagactatacggtaacttctcagttcaataactacactatcgataccaaagactggactatcggcgtactatccacacctgatggtttggatataccattgactaatataacttattggtcacggtttactataggtcgtgcattgttcaaatcagagtctgaggatattttccaaaagaaaatgagtattctaggtgtttctatagaatgtaagaagtcgtcgacattacttacttttttgaccgtgcgtaaaatgactcgagtatttaataaatttccagatatggcttattatcgaggagactgtttaaaagccgtttatgtaacaatgacttataaaaatactaaaactggagagactgattacacgtacctctctaatggggggttgcctgcatactatcgtaatggggtcgatggttgattattgattagtatattccttattcacacaaaaagaacatttttataaacatgaaaccactgtctaaatgtaattatgatcttgatttatagatgaagatcagcctttagaggattttaaccagtatgtttaatatgaaaaaaataaacataacatattttgagattaagcgctattgtgcttaattattttgctctataaactgaatatatagccacaattattgacgggcttgtttatgaccggcaatcatgaatttacagaaattatctctggctatatatcttactgcgacatgttcgtggtgttatgaaacatgcataagaaaaactgcgttgtatcatgacattcaattggagcatgtagaagacaataaagatagtgtagcgtcgctaccgtacaagtagtcaatcaaagagaacgtagtagattgttggctacatttaattggacagatatagctgagggtgttagaaatgagttcattaaaatatgtgatatcaacggaacatatttatataattatactattgctgttagtataattattgattccacggaagaactaccaacagttactccaattacaacaacatatgaaccttctacatataattatactatcgatgatagcactgttattactactgaagaactacaagtgactcctcatatggatctccatcgatgatacatgtattaaaatactttccgaataagtcttttaaatattgtattaattatgaaaaactatgctatgcgagtatgatgcaaagatgtttaatgatacgatactagattttatctctagcgagagatgtcgttagaatcatttatcataactacgtttaataataattcatcaacgaatatcgataacatgtgtcatttatacgttaaagtctgtccgtcttctctattgtttagactgtttgtagaatgctgtgatataaacaaactagtagaaggtacgactccgttacactgttatctaatgaatgaaggatttgaatcatctgttttaaaaaacctattaaaggagtatgtcatgaatacgtttaatgttcatgacatccattacacaaatatttaactcatgatgaagttgagaatgatatgctttctgatagtatagatagctttagctaatataaaaatatattaatccactatatattctagacttgatttaaaaccgataaactactactacgtactgtataagttgttaaaaaaaggagcagaccctaattatgtagatgatagaggtaatacttttcttcattacttctgcatctatatgtccacttatgagaaaacgtcatttaataagatgcatcgtgaaaagaaatttattaaagagttggtaaaatatgaaaccgaaagtaaataatataggaaatacacctctacataactacgtatctcaatatgatatcactctcattcctcatccacaacccattaaaaaaatggaaattaaagccctctattagcataaacggctacaggtctacctttacaatggcctctccttgtgcccagttcagaccctgtcattgccacgctactaaggactccctgaataccgtggccgacgtcagacattgtctgactgaatacatcctgtgggtttctcatagatggacccatagagaaagcgcagggtctctctacaggcttctcatctctttcagaactgatgcaacggagctctttggtggtgagttgaaggattcacttccgtgggacaatatcgacaattgcgtggagatcattaaatgtttcatcagaaatgactccatgaaaaccgccgaagaacttcgtgcaatcattggactttgtactcaatcagctatcgtctctggaagagtcttcaacgataagtatatcgacatactacttatgctgcgaaagattctgaacgagaacgactatctcaccctcttggatcatatccgcactgctaaatactaaatctccttcatgctctctcactacactttttatcatcttatgaggaatgattgccttcatcatttttcgtgaaataggaataattagcaccagaatagctatggattgcacatgtattctatgtcgtctactggatgaagatgtgacgtacaaaaaaataaaactagaaattgaaacgtgtcacaacttatcaaaacatatagatagacgaggaaacaatgcgctacattgttacgtcttcaataaatgcgatacagacattaagattgttcgactgttactctctcgcggagtcgagagactttgtagaaacaacgaaggattaactccgctaggagcatacagtaagcatagatacgtaaaatctcaaattgtgcatctactgatatccagctattcgaattcctctaacgaactcaagtcgaatataaatgatttcgatctgtattcgtatatgtcttcggataatatcgacttacgtctgctaaaatacctaattgtggataaacggatacgtccgtccaagaatacgaattatgcaatcaatggtctcggattggtggatatatacgtaacgacgcctaatccgagaccagaagtattgctatggcttcttaaatcagaatgttacagcaccggttacgtatttcgtacctgtatgtacgacagtgatatgtgtaagaactctcttcattactatatatcgtctcatagagaatctcaatctctatccaaggatgtaattaaatgtttgatcaataacaatgtttccatccatggcagagacgaaggaggatctttacccatccaatactactggtcttgctcaaccatagatatagagattgttaaattattaataaaggatgtggacacgtgtagagtatacgacgtcagccctatattagaggcggattatctaaacaagcgatttagagtaaccccatataatgtagacatggaaatcgttaatcttcttattgagagacgtcatactcttgtcgacgtaatgcgtagtattacttcttacgattccagagactataaccactacatcatcgataacattctaaagagatttagacaacaggatgaatccatcgtacaagccatgttgataaactacttacattacggcgatatggtcgttcgatgcatgttagataacggacaacaactatcctctgcacgactactttgttaataataatctcgtcgatgtaaacgtcgtaaggtttatcgtggaaaataatggacacatggctgtaaatcacgtatcgaacaatggccgtctatgtatgtacggtctgatattatcgagatttaataattgcgggtatcactgttatgaaaccatactaatagatgtatttgatatactaagcaagtacatggataatatagatatgatcgataatgagaataaaactctactatattacgcggtcgatgtcaataatatacaatttgcaaagcggttattggaatatggagcgagtgttacaacatcacgctcgataatcaatacggccatccagaaaagtagttacagaagagaaaacaaaacgaggatagttgatttattacttagctaccatcccactctagagactatgattgacgcatttaatagagatatacgctatctatatcctgaaccattattcgcctgtatcagatacgccttaatcctagatgatgattttccttctaaagtaagtatgatatctccggtcgtcataaggaactaaagcgctatagagtagacattaatagaatgaagaatgcctacatatcaggcgtctccatgtttgatatattatttaaacgaagcaaacgccacagattgagatacgcaaagaatccgacatcaaatggtacaaaaaagaactaacgtccatcattacagaaactgtaaagaacaatgagaggatcgactccatagtggacaacattaatacagacgataacttgatttcgaaattacccatggagatactttattactccattaaataatttatcatggagcgataatgtcctgtttcatttgtttccatgacatattacaaaatcgattccgtccaagatgataaaaacatttaccggcatcataaacacggagtttattttatatgtctcgcataaacattactaaaaaaatatattgttcggttttctttcacatctttaattatgaaaaagtaaatcattatgagatggacgagattgtacgcatcgttcgcgacagtatgtggtacatacctaacgtatttatggacgacggtaagaatgaaggtcacgtttctgtcaacaatgtttgtcatatgtattttacgttctttgatgtggatacatcgtctcatctgtttaagctagttattaaacactgcgatctgaataaacgaggtaactctccattacattgctatacgatgaatacacgatttaatccatctgtattaaagatattgttacaccacggcatgcgtaactttgatagcaaggatgaaaaaggacatattcctctacaccactatctgattcattcactatcaatcgataacaagatctttgatatactaacggacaccattgatgactttagtaaatcatccgatctattgctgtgttatcttagatataaattcaatgggagcttaaactattacgttctgtacaaaggatccgaccctaattgcgtcgacgaggatggactcacttctcttcattactactgtaaacacatatccacgttctacaaaagcaattattacaagttaagtcacactaagatgcgagccgagaagcgattcatctacgcgataatagattatggagcaaacattaacgcggttacacacttaccttcaacagtataccaaacatagtcctcgtgtggtgtatgctcttttatctcgaggagccgatacgaggatacgtaataatcttgattgtacacccatcatggaacgattgtgcaacaggtcatattctcataatgttactcaattggcacgaacaaaaggaagaaggacaacatctactttatctattcataaaacataatcaaggatacactctcaatatactacggtatctactagataggttcgacattcagaaagacgaatactataataccgcctttcaaaattgtaacaacaatgttgcctcatacatcggatacgacatcaaccttccgactaaagacggtattcgacttggtgtttgaaaacagaaacatcatatacaaggcggatgttgtgaatgacatcatccaccacagactgaaagtatctctacctatgattaaatcgttgttctacaagatgtcagaattctctccctacgacgattactacgtaaaaaagatactagcctactgcctattaagggacgagtcattcgcggaactacatagtaaattctgtttaaacgaggactataaaagtgtatttatgaaaaatatatcattcgataagatagattccatcatcgtgacataagtcgccttaaagagattcgaatctccgacaccgacctgtatacggtatcacagctatcttaaagccatacattcggacagacacatttcatttcccatgtacgacgatctcatagaacagtgccatctatcgatggagcataaaagtaaactcgtcgacaaagcactcaataaattagagtctaccatcggtcaatctagactatcgtatttgcctccggaaattatgcgcaatatcatctaaacagtatgttgtacggaaagaaccattacaaatattatccatgatagaaagaaaatatctatatgattggagaagtaggaaacaggaacaagacgacgattactacattattaaatcatgaagtccgtattatactcgtatatattgtttctctcatgtataataataaacggaagagatatagcaccgcatgcaccatccgatggaaagtgtaaagacaacgaatacaaacgccataatttgtgtccgggaacatacgcttccagattatgcgatagcaagactaacacacgatgtacaccctgtggttcgggtaccttcacatctcgcaataatcatttacccgcttgtctaagttgtaacggaagacgcgatcgtgtaacacgactcacaatagaatctgtgaatgctctcccggatattattgtcttctcaaaggatcatccggatgcaaggcatgtgtttcccaaacaaaatgtggaataggatacggagtatccggagacgtcatctgttctccgtgtggtctcggaacatattctcacaccgtctcttccgcagataaatgcgaacccgtacccagtaatacctttaactatatcgatgtggaaattaatctgtatcccgtcaacgacacgtcgtgtactcggacgaccactaccggtctcagtgaatccatctcaacgtcggaactaactattactatgaatcataaagactgtaatcccgtatttcgtgaggaatacttctctgtccttaataaggtagcaacttcaggtttctttacaggagaaaggtgtgcactctgaatttcgagattaaatgcaataacaaagattcttcctccaaacagttaacgaaagcaaagaatgatgacggtatcatgccgcattcggagacagtaactctagtgggcgactgtatatctagcgtcgacatctatatactatatagtaataccaatactcaagactacgaaactgatacaatctcttatcatgtgggtaatgttctcgatgtcgatagccatatgcccggtagttgcgatatacataaactgatcactaattccaaacccacccgctttttatagtaagtttttcacccataaataataaatacaataattaatttctcgtaaaagtagaaaatatattctaatttattgcatggtaaggaagtagaatcataaagaacagtactcaatcaatagcaattatgaaacaatatatcgtcctggcatgcatgtgcctgccagtcttcagcaatcatcctcatcctcatcctcgtgtacggaagaagaaaacaaacatcatatgggaatcgatgttattatcaaagtcacaaagcaagaccaaacaccgaccaatgataagatttgccaatccgtaacggaaattacagagtccgagtcagatccaaatcccgaggtggaatcagaagatgattccacatcagtcgaggatgtagatcctcctaccacttattactccatcatcggtggaggtctgagaatgaactttggattcaccaaatgtcctcagattaaatccatctcagaatccgctgatggaaacacagtgaatgctagattgtccagcgtgtccccaggacaaggtaaggactctcccgcgatcactcatgaagaagctcttgctatgatcaaagactgtgaggtgtctatcgacatcagatgtagcgaagaagagaaagacagcgacatcaagacccatccagtactcgggtctaacatctctcataagaaagtgagttacgaagatatcatcggttcaacgatcgtcgatacaaaatgtgtcaagaatctagagtttagcgttcgtatcggagacatgtgcaaggaatcatctgaacttgaggtcaaggatggattcaagtatgtcgacggatcggcatctgaaggtgcaaccgatgatacttcactcatcgattcaacaaaactcaaagcgtgtgtctgaatcgataactctattcatctgaaattggatgagtagggttaatcgaacgattcaggcacaccacgaattaaaaaagtgtaccggacactatattccggtttgcaaaacaaaaatgttcttaactacattcacaaaaagttacctctcgcgacttcttctttttctgtctcaatagtgtgatacgattatgacactattcctattcctattcctatttcctttcagggtatcacaaaaatattaaacctctttctgatggtctcataaaaaaagttttacaaaaatatttttattctctttctctctttgatggtctcataaaaaaagttttacaaaaatatttttattctctttctctctttgat

SEQ ID NO: 86 - DNA, 198639 bp, Vaccinia virus
  source 1..198639: mol_type = genomic DNA
  misc_feature 1..198639: note = VIR109
atcaaagagagaaagagaataaaaatatttttgtaaaactttttttatgagaccatcaaagagagaaagagaataaaaatatttttgtaaaactttttttatgagaccatcagaaagaggtttaatatttttgtgataccctgaaaggaaataggaataggaataggaatagtgtcataatcgtatcacactattgagacagaaaaagaagaagtcgcgagaggtaactttttgtgaatgtagttaagaacatttttgttttgcaaaccggaatatagtgtccggtacacttttttaattcgtggtgtgcctgaatcgttcgattaaccctactcatccaatttcagatgaatagagttatcgattcagacacacgctttgagttttgttgaatcgatgagtgaagtatcatcggttgcaccttcagatgccgatccgtcgacatacttgaatccatccttgacctcaagttcagatgattccttgcacatgtctccgatacgaacgctaaactctagattcttgacacattttgtatcgacgatcgttgaaccgatgatatcttcgtaactcactttcttatgagagatgttagacccgagtactggatgggtcttgatgtcgctgtctttctcttcttcgctacatctgatgtcgatagacacctcacagtctttgatcatagcaagagcttcttcatgagtgatcgcgggagagtccttaccttgtcctggggacacgctggacaatctagcattcactgtgtttccatcagcggattctgagatggatttaatctgaggacatttggtgaatccaaagttcattctcagacctccaccgatgatggagtaataagtggtaggaggatctacatcctcgactgatgtggaatcatcttctgattccacctcgggatttggatctgactcggactctgtaatttccgttacggattggcaaatcttatcattggtcggtgtttggtcttgctttgtgactttgataataacatcgattcccatatgatgtttgttttcttcttccgtacacgaggatgaggatgaggatgattgctgaagactggcaggcacatgcatgccaggacgatatattgtttcataattgctattgattgagtactgttctttatgattctacttccttaccatgcaataaattagaatatattttctacttttacgagaaattaattattgtatttattatttatgggtgaaaaacttactataaaaagcgggtgggtttggaattagtgatcagtttatgtatatcgcaactaccgggcatatggctatcgacatcgagaacattacccacatgataagagattgtatcagtttcgtagtcttgagtattggtattactatatagtatatagatgtcgacgctagatatacagtcgcccactagagttactgtctccgaatgcggcatgataccgtcatcattctttgctttcgttaactgtttggaggaagaatctttgttattgcatttaatctcgaaattcagagtgcacacctttctcctgtaaagaaacctgaagttgctaccttattaaggacagagaagtattcctcacgaaatacgggattacagtctttatgattcatagtaatagttagttccgacgttgagatggattcactgagaccggtagtggtcgtccgagtacacgacgtgtcgttgacgggatacagattaatttccacatcgatatagttaaaggtattactgggtacgggttcgcatttatctgcggaagagacggtgtgagaatatgttccgagaccacacggagaacagatgacgtctccggatactccgtatcctattccacattttgtttgggaaacacatgccttgcatccggatgatcctttgagaagacaataatatccgggagagcattcacagattctattgtgagtcgtgttacacgatcgcgtcttccgttacaacttagacaagcgggtaaatgattattgcgagatgtgaaggtacccgaaccacagggtgtacatcgtgtgttagtcttgctatcgcataatctggaagcgtatgttcccggacacaaattatggcgtttgtattcgttgtctttacactttccatcggatggtgcatgcggtgctatatctcttccgtttattattatacatgagagaaacaatatatacgagtataatacggacttcatgatttaataatgtagtaatcgtcgtcttgttcctgtttcctacttctccaatcatatagatattttctttctatcatggataatatttgtaatggttctttccgtacaacatactgtttagatgatattgcgcataatttccggaggcaaatacgatagtctagattgaccgatggtagactctaatttattgagtgctttgtcgacgagtttacttttatgctccatcgatagatggcactgttctatgagatcgtcgtacatgggaaatgaaatgtgtctgtccgaatgtatggctttaagatagctgtgataccgtatacaggtcggtgtcggagattcgaatctctttaaggcgacttatgtcacgatgatggaatctatcttatcgaatgatatatttttcataaatacacttttatagtcctcgtttaaacagaatttactatgtagttccgcgaatgactcgtcccttaataggcagtaggctagtatcttttttacgtagtaatcgtcgtagggagagaattctgacatcttgtagaacaacgatttaatcataggtagagatactttcagtctgtggtggatgatgtcattcacaacatccgccttgtatatgatgtttctgttttcaaacaccaagtcgaataccgtctttagtcggaaggttgatgtcgtatccgatgtatgaggcaacattgttgttacaattttgaaaggcggtattatagtattcgtctttctgaatgtcgaacctatctagtagataccgtagtatattgagagtgtatccttgattatgttttatgaatagataaagtagatgttgtccttcttccttttgttcgtgccaattgagtaacattatgagaatatgacctgttgcacaatcgttccatgatgggtgtacaatcaagattattacgtatcctcgtatcggctcctcgagataaaagagcatacaccacacgaggactatgtttggtatactgttgaaggtaagtgtgtaaccgcgttaatgtttgctccataatctattatcgcgtagatgaatcgcttctcggctcgcatcttagtgtgacttaacttgtaataattgcttttgtagaacgtggatatgtgtttacagtagtaatgaagagaagtgagtccatcctcgtcgacgcaattagggtcggatcctttgtacagaacgtaatagtttaagctcccattgaatttatatctaagataacacagcaatagatcggatgatttactaaagtcatcaatggtgtccgttagtatatcaaagatcttgttatcgattgatagtgaatgaatcagatagtggtgtagaggaatatgtcctttttcatccttgctatcaaagttacgcatgccgtggtgtaacaatatctttaatacagatggattaaatcgtgtattcatcgtatagcaatgtaatggagagttacctcgtttattcagatcgcagtgtttaataactagcttaaacagatgagacgatgtatccacatcaaagaacgtaaaatacatatgacaaacattgttgacagaaacgtgaccttcattcttaccgtcgtccataaatacgttaggtatgtaccacatactgtcgcgaacgatgcgtacaatctcgtccatctcataatgatttactttttcataattaaagatgtgaaagaaaaccgaacaatatatttttttagtaatgtttatgcgagacatataaaataaactccgtgtttatgatgccggtaaatgtttttatcatcttggacggaatcgattttgtaatatgtcatggaaacaaatgaaacaggacattatcgctccatgataaattatttaatggagtaataaagtatctccatgggtaatttcgaaatcaagttatcgtctgtattaatgttgtccactatggagtcgatcctctcattgttctttacagtttctgtaatgatggacgttagttcttttttgtaccatttgatgtcggattctttgcgtatctcaatctgtggcgtttgcttcgtttaaataatatatcaaacatggagacgcctgatatgtaggcattcttcattctattaatgtctactctatagcgctttagttccttatgacgaccggagatatcatacttactttagaaggaaaatcatcatctaggattaaggcgtatctgatacaggcgaataatggttcaggatatagatagcgtatatctctattaaatgcgtcaatcatagtctctagagtgggatggtagctaagtaataaatcaactatcctcgttttgttttctcttctgtaactacttttctggatggccgtattgattatcgagcgtgatgttgtaacactcgctccatattccaataaccgctttgcaaattgtatattattgacatcgaccgcgtaatatagtagagttttattctcattatcgatcatatctatattatccatgtacttgcttagtatatcaaatacatctattagtatggtttcataacagtgatacccgcaattattaaatctcgataatatcagaccgtacatacatagacggccattgttcgatacgtgatttacagccatgtgtccattattttccacgataaaccttacgacgtttacatcgacgagattattattaacaaagtagtcgtgcagaggatagttgttgtccgttatctaacatgcatcgaacgaccatatcgccgtaatgtaagtagtttatcaacatggcttgtacgatggattcatcctgttgtctaaatctctttagaatgttatcgatgatgtagtggttatagtctctggaatcgtaagaagtaatactacgcattacgtcgacaagagtatgacgtctctcaataagaagattaacgatttccatgtctacattatatggggttactctaaatcgcttgtttagataatccgcctctaatatagggctgacgtcgtatactctacacgtgtccacatcctttattaataatttaacaatctctatatctatggttgagcaagaccagtagtattggatgggtaaagatcctccttcgtctctgccatggatggaaacattgttattgatcaaacatttaattacatccttggatagagattgagattctctatgagacgatatatagtaatgaagagagttcttacacatatcactgtcgtacatacaggtacgaaatacgtaaccggtgctgtaacattctgatttaagaagccatagcaatacttctggtctcggattaggcgtcgttacgtatatatccaccaatccgagaccattgattgcataattcgtattcttggacggacgtatccgtttatccacaattaggtattttagcagacgtaagtcgatattatccgaagacatatacgaatacagatcgaaatcatttatattcgacttgagttcgttagaggaattcgaatagctggatatcagtagatgcacaatttgagattttacgtatctatgcttactgtatgctcctagcggagttaatccttcgttgtttctacaaagtctctcgactccgcgagagagtaacagtcgaacaatcttaatgtctgtatcgcatttattgaagacgtaacaatgtagcgcattgtttcctcgtctatctatatgttttgataagttgtgacacgtttcaatttctagttttatttttttgtacgtcacatcttcatccagtagacgacatagaatacatgtgcaatccatagctattctggtgctaattattcctatttcacgaaaaatgatgaaggcaatcattcctcataagatgataaaaagtgtagtgagagagcatgaaggagatttagtatttagcagtgcggatatgatccaagagggtgagatagtcgttctcgttcagaatctttcgcagcataagtagtatgtcgatatacttatcgttgaagactcttccagagacgatagctgattgagtacaaagtccaatgattgcacgaagttcttcggcggttttcatggagtcatttctgatgaaacatttaatgatctccacgcaattgtcgatattgtcccacggaagtgaatccttcaactcaccaccaaagagctccgttgcatcagttctgaaagagatgagaagcctgtagagagaccctgcgctttctctatgggtccatctatgagaaacccacaggatgtattcagtcagacaatgtctgacgtcggccacggtattcagggagtccttagtagcgtggcaatgacagggtctgaactgggcacaaggagaggccattgtaaaggtagacctgtagccgtttatgctaatagagggctttaatttccatttttttaatgggttgtggatgaggaatgagagtgatatcatattgagatacgtagttatgtagaggtgtatttcctatattatttactttcggtttcatattttaccaactctttaataaatttcttttcacgatgcatcttattaaatgacgttttctcataagtggacatatagatgcagaagtaatgaagaaaagtattacctctatcatctacataattagggtctgctcctttttttaacaacttatacagtacgtagtagtagtttatcggttttaaatcaagtctagaatatatagtggattaatatatttttatattagctaaagctatctatactatcagaaagcatatcattctcaacttcatcatgagttaaatatttgtgtaatggatgtcatgaacattaaacgtattcatgacatactcctttaataggttttttaaaacagatgattcaaatccttcattcattagataacagtgtaacggagtcgtaccttctactagtttgtttatatcacagcattctacaaacagtctaaacaatagagaagacggacagactttaacgtataaatgacacatgttatcgatattcgttgatgaattattattaaacgtagttatgataaatgattctaacgacatctctcgctagagataaaatctagtatcgtatcattaaacatctttgcatcatactcgcatagcatagtttttcataattaatacaatatttaaaagacttattcggaaagtattttaatacatgtatcatcgatggagatccatatgaggagtcacttgtagttcttcagtagtaataacagtgctatcatcgatagtataattatatgtagaaggttcatatgttgttgtaattggagtaactgttggtagttcttccgtggaatcaataattatactaacagcaatagtataattatataaatatgttccgttgatatcacatattttaatgaactcatttctaacaccctcagctatatctgtccaattaaatgtagccaacaatctactacgttctctttgattgactacttgtacggtagcgacgctacactatctttattgtcttctacatgctccaattgaatgtcatgatacaacgcagtttttcttatgcatgtttcataacaccacgaacatgtcgcagtaagatatatagccagagataatttctgtaaattcatgattgccggtcataaacaagcccgtcaataattgtggctatatattcagtttatagagcaaaataattaagcacaatagcgcttaatctcaaaatatgttatgtttatttttttcatattaaacatactggttaaaatcctctaaaggctgatcttcatctataaatcaagatcataattacatttagacagtggtttcatgtttataaaaatgttctttttgtgtgaataaggaatatactaatcaataatcaaccatcgaccccattacgatagtatgcaggcaaccccccattagagaggtacgtgtaatcagtctctccagttttagtatttttataagtcattgttacataaacggcttttaaacagtctcctcgataataagccatatctggaaatttattaaatactcgagtcattttacgcacggtcaaaaaagtaagtaatgtcgacgacttcttacattctatagaaacacctagaatactcattttcttttggaaaatatcctcagactctgatttgaacaatgcacgacctatagtaaaccgtgaccaataagttatattagtcaatggtatatccaaaccatcaggtgtggatagtacgccgatagtccagtctttggtatcgatagtgtagttattgaactgagaagttaccgtatagtctttttggtcatctctaaacaaggaaactaatacctctacactattgaacgatttatcttccgtaatgggtggaataacgggaatataaagtggactagcgatggatgaagtcacgaatataagacacgctattaatccgtatatcatcattttgatattacttataataacgatttgtttaatttttagtttatactattaattgtaaatgatattattatttttttaagtattatcagctttagtttatactattactatttgtaatatttagacatagataaacgtgataaaagtctatttgtttatatttattgcggatagcagtatttccctataaaaagtatacgtcctgtgttgtctttaatcatgtacatgaatggatggtttatgtagaccttcgtacgatataccatcgaaaagttagtcataaatactcctgtaacggccgatgcttctgtatactcctcattaacatctataaacgtcgtatgtagaaatttttctacagtgatagtttcattacacatcttgctaaaatctgcataatatccgaatatattagtaagtcctaaattttctaaaatcggtaccagattatacggttctgtcatttccactttaaactttggcatatacaagtctatacttttagtagataacataccacaccattttttaaatttttcatctgttatatttttttctatgttatatataccttctatgtcgtccggtagtataattaccatactagagtttccctcgtatggaatatcgataatagagaatcctccgaataattcattaatatgtacatattgcaagttattctcggtacccaccatcatatcaacactggtaactatattcttagaaatataaaacttgtctgtatatgtaagatgtttagaaaatggatatttccacattgctttaaaatggacggcgctaacaactgtcatacgagtattaatggatagcggactagtcaataaggaattaattttaccatttgtcatcgtcttaacccattcgttgattagttcctttgtttggttagcattattaaagtttacagtttgaaaatcgtcttttattttttgtaggaaggaggcgtggaactcgatactatcgctaccgtatattttatttgcggtagctagtgtcgcacaatacggaatatctacgtccatgtcattattgtcatccttcttatcatcgggtgtattctcattcatattctctatatattttgatagttgttcagctgtagaaccagctgctccatgatttagaatagataaagtagataaaatagaaactggagaaatcaaaacattttcatcagggtgttttaagattagttctttaaagatatccatggtatagaccaaacaataacgataacgatatatatcataaataaataatgttaaatttcagtttatgtttgtaccccgtattcatacttaacaaattggtattgcgtacacaatcaatcatattacataccattaataatgcaagcataaaaaatcgttagtagatgtttctaaatataggttccgtaagcaaagaatataagaatgaagcggtaatgataaaatcaatcgttatctaaaatgatcatactcatttattttattctattatattaacacatacatttttaacagcaacacattcaatattgtattgttatttttatattatttacacaattaacaatatattattagtttatattactgaattaataatataaaattcccaatcttgtcataaacacacactgagaaacagcataaacacaaaatccatcaaaaatgtcgatgaaatatctgatgttgttgttcgctgctatgataatcagatcattcgccgatagtggtaacgctatcgaaacgacattgccagaaattacaaacgctacaacagatattccagctatcagattatgcggtccagagggagatggatattgtttacacggtgactgtatccacgctagagatatcgacggtatgtattgtagatgctctcatggttatacaggcattagatgtcagcatgtagtattagtagactatcaacgttcagaaaaaccaaacactacaacgtcatatatcccatctcccggtattgtgcttgtattagtaggcattattattatgtgttgtctattatctgtttataggttcactcgaagaactaataaactacctctacaagatatggttgtgccataatttttataaatttttttatgagtatttttacaaaaaaaatgtataaagtgtatgtcttatgtatatttataaaaatgctaagtatgcgatgtatctatgttatttgtatttatctaaacaatacctctacctctagatattatacaaaaattttttatttcggcatattaaagtaaaatctagttaccttgaaaatgaatacagtgggtggttccgtatcaccagtaagaacataatagtcgaatacagtatccgattgagattttgcatacaatactagtctagaaagaaatttgtaatcattttctgtgacgggagtccatatatctgtatcatcgtctagtttatcagtgtcccatgctatatttctgttatcatcattagttaatgaaaataactctcgtgcttcagaaaagtcaaatattgtatccatacatacatctccaaaactatcgcttatacgtttatctttaacgatacctatacctagatggttatttactaacagacattttccagatctattgactataactcctatagtttccacatcaaccaagtaatgatcatctattgttatataacaataacataactcttttccatttttatcagtatgtatatctatatcaacgtcgtcgttgtagtgaatagtagtcattgatctattatatgaaacggatatgtctagaacggcaattgtcttacgtccagttaacactttcgttgatttaaagtctagagtctttgcaaacataatatccttatccgactttatatttcctgtagggtggtataattttattttgcctccacatatcggtgtttccaaatatattactagacaatattccatatagttattagttaagggtacccaattagaacacgtacgcttattatcatcatttggatcgtatttcataaaagttattgtactatcgatgtcaacacattctacattttttaatcgtctatatagtatttttctgatattttctataatatcagaattgtcttccatcggaagttgtatactatcggaatcagttacatgtttaaataattctctgatgtcattccttatacaatcaaattcattattaaacagtttaatagtctgtagacctttatcgtcgtaaatatccattgtcttattagttacgcttatttttatgtgttttacgttgctttattatattttataagaatgattgtttgacgaatcacgagaactattaagacacattattaggtatatattataaaaaagtttttgattacgatgttataagaggaaagaggacacattaacatcatacatcaattaactacattcttataacatcgtaatcaaaagaattgcaattttgatgtataacaactgtcaatgggttatggaattgtatattacatattatacggtatgttggtaacgacaaataccgatcggtaatcgtttgccggtgtaatagaattatatatatctatctattacaccggctgagtatacataataataagttgtggtagtatgatctccatatttataatttaggactttgtattcagtatttttggaatcataaaaaataaaaaaaagttttactaatttaaaatttaaaaagtatttacatttttttcactgtttagtcgcggatatggaattcgatcctgccaaaatcaatacatcatctatagatcatgtaacaatattacaatacatagatgaaccaaatgatataagactaacagtatgcattatccgaaatattaataacattacatattatatcaatatcacaaaaataaatacacatttggctaatcaatttcgggcttggaaaaaacgtatcgccggaagggactatatgactaacttatctagagatacaggaatacaacaatcaaaacttactgaaactatacgtaactgtcaaaaaaatagaaacatatatggtctatatatacactacaatttagttattaatgtggttattgattggataaccgatgtgattgttcaatcaatattaagagggttggtaaattggtacatagctaataatacctatactccaaatacacccaataatacaacaaccatttctgagttggatatcatcaaaatactaaataaatacgaggacgtgtatagagtaagtaaagaaaaagaatgtggaatttgctatgaagttgtttactcaaaacgattagaaaacgatagatactttggtttattggattcgtgtactcatatattttgcataacatgcatcaatatatggcataaaacacgaagagaaaccggtgcgtcggataattgtcctatatgtcgtacccgttttagaaacataacaatgagcaagttctataagctagttaactaataaataaaaagtttaatttgttgacgacgtatgtcgttattttttctcgtataaaagattaatttgattctaatataatctttagtattggataaatatcaattcaaattaattccattagattatatcataaataaaaatagtagcacgcactacttcagccaaatattcttttttgaaacgccatctatcgtagtgaggacacaagtgaacctataatgagcaaatttattagtatcggttacatgaaggactttacgtagagtggtgattccactatctgtggtacgaacggtttcatcttctttgatgccatcacccagatgttctataaacttggtatcctcgtccgatttcatatcctttgccaaccaatacatatagctaaactcaggcatatgttccacacatcctgaacaatgaaattctccagaagatgttacaatgtctagatttggacatttggtttcaaccgcgttaacatatgagtgaacacacccatacatgaaagcgatgagaaataggattttcatcttgccaaaatatcactagaaaaaatttatttatcaattttaaaggtataaaaaatacttattgttgctcgaatattttgtatttgatggtatacggaagattagaaatgtaggtattatcatcaactgattctatggttttatgtattctatcatgtttcactattgcgttggaaataatatcatatgcttccacatatattttattttgttttaactcataatactcacgtaattctggattattggcatatctgtgaataattttagctccatgatcagtaaatattaatgagaacatagtattaccacctaccattatttttttcatttcgttcaattcttgattgcaaagatctatataatcattatagcgttgacttatggactctggaatcttagacgatgtacagtcatctataatcatggcatatttaatacattgttttatagcatagtagttatctacgatgttagatatttctctcaatgaatcaatcacacaatctaatgtaggtttatgacataatagcattttcagcagttcaatgtttctagattcgttgatggcaatggctatacatgtatatccgttatttgatctaatgttgacatctgaaccggattctagcagtaaagatactagagattgtttattatatctaacagccttgtgaagaagtgtttctcctcgtttgtcaatcatgttaatgtctttaagataaggtaggcaaatgtttatagtactaagaattgggcaagcataagacatgtcacaaagaccctttttgtatgtataagtgtagaaattataacatccatagttggatttacataggtgtccaatcgggatctctccatcatcgagatgattgacggcatctcccccttccttttttagtagatatttcatcgtgtaagaatcaatattaatatttctaaagtatccgtgtatagcctctttatttaccacagctccatattccaacatgcattccactaaagggatatcgatatcgccgaatgtcatatactcaattagtatatgttggaggacatccgagttcattgttttcaatatcaaagagatggtttccttatcatttctccatagtggtacaatactacacattattccgtgaggctttccattctccaaaaacaatttgaccaaatctacatctttattgtatctataatcactatttagataatcagccataattcctcgagtgcaacatgttagatcgtctatatatgaataagccgtgttatctattcctttcattaacaatttaacgatgtctatatctatatgagatgacttaatataatattgaagagctgtacaatagtttttatctatagaagacggcttgattccgtgattaattagacatttaacaacttccggacgcacatatgctctcgtatccgactctgaatacagatgagagatgatatacagatgcaatacggtaccgcaatttcgtagttgataatcatcatacgcgtatccgtactcgtcctcataaagaacactgcagccattttctatgaacaaatcaataattttaggaacaggatcattgtcattacataattttctataactgaacgatggttttcacatttaacactcaagtcaaatccatgttctaccaacacctttatcaagtcaacgtctacatttttggatttcatatagctgaatatattaaagtcatttatgttgctaaatccagtggcttctagtagagccatcgctatatcctttaactttaacatgtctactatttgtgtattcttctaatggggtagctgtctccaatttttgcgtaatggattagtgccactgtctagtagtagtttgacgacctcgacattattacaatgctcattaaaaaggtatgcgtgtaaagcattattcttgaattggttcctggtatcattaggatctctgtctctcaacatctgtttaagttcatcgagagccacctcctcattttccaaatagtcaaacattttgactgaatagaagtgaatgagctactgtgaactctatacacccacacaactaatgtcattaaatattatttttttgaatgtatttataccatgtcaaaaacttgtacaattattaataaaaataatttagtgtttaaattttaccagttccagattttacacctccgttaaccccactttttacaccactggacgaccctcctccccacattccaccgccaccagatgtataagttttagatcctttattactaccatcatgtccatggataaagacactccacatgccgccactaccccctttagaagacatattaataagacttaagagttaaggacaagtttaacaataaaattaatcacgagtaccctactaccaacctacactattatatgattatagtttctatttttacagtaccttaactaaagtttctagtcacaagagcaatactaccaacctacactattatatgattatagtttctatttttataggaacgcgtacgagaaaatcaaatgtctaatttctaacggtagtgttgataaacgattatcgtcaatggatacctcctctatcatgtcgtctattttcttactttgttctattaacttattagcattatatattatttgattataaaacttatattgcttattagcccaatctgtaaatatcggattattaacatatcgtttctttgtaggtttatttaacttgtacatcactgtaagcatgtccgtaccatttattttaatttgacgcatatccgcaatttctttttcgcagtcggttataaattctatatatgatggatacatgctacatgtgtacttataatcgactaatatgaagtacttgatacatattttcagtaacgatttattattaccacctatgaataagtacctgtgatcgtctaggtaatcaactgttttcttaatacattcgatggttggtaatttactcagaataatttccaatatcttaatatataattctgctatttctggaatatatttatctgccagtataacacaaatagtaatacatgtaaacccatattttgttattatattaatgtctgcgccattatctattaaccattctactaggctgacactatgcgacttaatacaatgataaagtatactacatccatgtttatctattttgtttatatcatcaatatacggcttacaaagttttagtatcgataacacatccaactcacgcatagagaaggtagggaataatggcataatatttattaggttatcatcattgtcattatctacaactaagtttccattttttaaaatatactcgacaactttaggatctctattgccaaatttttgaaaatatttatttatatgcttaaatctatataatgtagctccttcatcaatcatacatttaataacattgatgtatactgtatgataagatacatattctaacaatagatcttgtatagaatctgtatatcttttaagaattgtggatattaggatattattacgtaaactattacacaattctaaaatataaaacgtatcacggtcgaataatagttgatcaactatataattatcgattttgtgatttttcttcctaaactgtttacgtaaatagttagatagaatattcattagttcatgaccactatagttactatcgaataacgcgtcaaatatttcccgtttaatatcgcatttgtcaagataataatagagtgtggtatgttcacgataagtataataacgcatctctttttcgtgtgaaattaaatagtttatcacgtccaaagatgtagcataaccatcttgtgacctagtaataatataataatagagaactgttttacccattctatcatcataatcagtggtgtagtcgtaatcgtaatcgtctaattcatcatcccaattataatattcaccagcacgtctaatctgttctattttgatcttgtatccatactgtatgttgctacatgtaggtattcctttatccaataatagtttaaacacatctacattgggatttgatgttgtagcgtatttctctacaatattaataccatttttgatactatttatttctatacctttcgaaattagtaatttcaataagtctatatcgatgttatcagaacatagatattcgaatatatcaaaatcattgatatttttatagtcgactgacgacaataacaaaatcacaacatcgtttttgatattattatttttcttggtaacgtatgcctttaatggagtttcaccatcatactcatataatggatttgcaccactttctatcaatgattgtgcactgctggcatcgatgttaaatgttttacaactatcatagagtatcttatcgttaaccatgattggttgttgatgctatcgcattttttggtttctttcatttcagttatgtatggatttagcacgtttgggaagcataagctcatatgatttcagtactgtagtgtcagtactattagtttcgatcagatcaatgtctagatctatagaatcaaaacacgataggtcagaagataatgaatatctgtaggcttcttgttgtactgtaacttctcgttttgttagatggttgcatcgtgctttaacatcaatggtacaaattttatcctcgctttgtgtatcatattcgtccctactataaaattgtatattcagattatcatgagatgtgtatacgctaacggtatcaataaacggagcacaccatttagtcataaccgtaatccaaaaatttttaaagtatatcttaacgaaagaagttgtgtcattgtctacggtgtatggtactagatcctcataagtgtatatatctagagtaatgtttaatttatcaaatggttgataatatggatcctcatggcaatttcctaagacgaaaataagacataaacacgcaataaatctaattgcggacatggttactccttaaaaaaatactaataatcaccttggctatttagtaagtgtcatttaacactatactcatattaatccatggactcataatctctatacgggattaacggatgttctatatacggggatgagtagttctcttctttaactttatactttttactaatcatatttagactgatgtatgggtaatagtgtttgaagagctcgttctcatcatcagaataaatcaatatctctgtttttttgttatacagatgtattacagcctcatatattacgtaatagaacgtgtcatctaccttattaactttcaccgcatagttgtttgcaaatacggttaatcctttgacctcgtcgatttccgaccaatctgggcgtataatgaatctaaactttaatttcttgtaatcattcgaaataatttttagtttgcatccgtagttatcccctttatgtaactgtaaatttctcaacgcgatatctccattaataatgatgtcgaattcgtgctgtatacccatactgaatggatgaacgaataccgacggcgttaatagtaatttactttttcatctttacatattgggtactagttttactatcataagtttataaattccacaagctactatggaataagccaaccatcttagtataacacacatgtcttaaagtttattaattaattacatgttgttttatatatcgctacgaatttaaacagagaaatcagtttaggaaaaaaaattatctatctacatcatcacgtctctgtattctacgatagagtgctactttaagatgagacatatccgtgtcatcaaaaatatactccattaaaatgattattccggcagcgaacttgatattggatatatcacaacctttgttaatatctacgacaatagacagcagtcccatggttccataaacagtgagtttatctttctttgaagagatattttgtagagatcttataaaactgtcgaatgacatcgcatttatatctttagctaaatcgtatatgttaccatcgtaatatctaaccgcgtctatcttaaacgtttccatcgctttaaagacgtttccgatagatggtctcatttcatcagtcatactgagccaacaaatataatcgtgtataacatctttgatagaatcagactctaaagaaaacgaatcggctttattatacgcattcatgataaacttaatgaaaaatgtttttcgttgtttaagttggatgaatagtatgtcttaataattgttattatttcattaattaatatttagtaacgagtacactctataaaaacgagaatgacataactaatcataactagttatcaaagtgtctaggacgcgtaattttcatatggtatagatcctgtaagcattgtctgtattctggagctattttctctatcgcattagtgagttcagaatatgttataaatttaaatcgaataacgaacataactttagtaaagtcgtctatattaactcttttattttctagccatcgtaataccatgtttaagatagtatattctctagttactacgatctcatcgttgtctagaatatcacatactgaatctacatccaattttagaaattggtctgtgttacatatctcttctatattattgttgatgtattgtcgtagaaaactattacgtagaccattttctttataaaacgaatatatagtactccaattatctttaccgatatatttgcacacataatccattctctcaatcactacatctttaagattttcgttgttaagatatttggctaaactatataattctattagatcatcaacagaatcagtatatatttttctagatccaaagacgaactctttggcgtcctctataatattcccagaaaagatattttcgtgttttagtttatcgagatctgatctgttcatatacgccatgattgtacggtacgttatgataaccgcataaaataaaaatccattttcatttttaaccaatactattcataattgagattgatgtaatactttgttactttgaacgtaaagacagtacacggatccgtatctccaacaagcacgtagtaatcaaatttggtgttgttaaacttcgcaatatttatcaatttagatagaaacttatactcatcatctgttttaggaatccatgtattattaccactttccaacttatcattatcccaggctatgtttcgtccatcatcgttgcgcagagtgaataattcttttgtattcggtagttcaaatatataatccatgcatagatcggtaaagctattgtagatgtgatttttcctaaatctaatataaaactcgtttactagcaaacactttcctgatttatcgaccaagacacatatggtttctaaatctatcaagtggtggggatccatagttatgacgcagtaacatagattattaccttcttaactgtcgctaatatctatatatttattgttatcgtattggattctgcatatagatggcttgtatgtcaaagatatagaacacataaccaatttatagtcgcgctttacattctcgaatctaaagttaagagatttagaaaacattatatcctcggatgatgttatcactgtttctggagtaggatatattaaagtctttacagatttcgtccgattcaaataaatcactaaataatatcccacattatcatctgttagagtagtatcattaaatctattatattttatgaaagatatatcactgctcacctctatatttcgtacatttttaaactgtttgtataatatctctctgatacaatcagatatatctattgtgtcggtagacgataccgttacatttgaattaatggtgttccattttacaacttttaacaagttgaccaattcatttctaatagtatcaaacgctccatgattaaatattttaatagtatccattttatatcactacggacacaaagtagctgacataaaccattgtataatttttatgttttatgtttattagcgtacacattttggaagttccggcttccatgtatttcctggagagcaagtagatgatgaggaaccagataggttatatccgtacttgcacttaaagtttacattgtcgttgtatgagtatgatcttttaaacccgctagacaagtatccgtttgatattgtaggatgtggacatttaacaatctgacacgtgggtggatcggaccattctcctcctgaacacaggacaccagagttaccaatcaacgaatatccactattgcaactataagttacaacgcttccatcggtataaaaatcctcgtatccgttatgtcttccgttggatatagatggaggggattggcatttaacagattcacaaataggtgcctcgggattccataccatagatccagtagatcctaattcacaatacgatttagattcaccgatcaaatgatatccgctattacaagagtacgttatactagagccaaagtctactccgccaatatcaagttggccattatcgatatctcgaggcgatgggcatctccgtttaatacattgattaaagagtgtccatccagtacctgtacatttagcatatataggtcccattttttgctttctgtatccaggtagacatagatattctatagtgtctcctatgttgtaattagcattagcatcagtctccacactattcttaaatttcatattaatgggtcgtgacggaatagtacagcatgatagaacgcatcctattcccaacaatgtcaggaacgtcacgctctccaccttcatatttatttatccgtaaaaatgttatcctggacatcgtacaaataataaaaagcccatatatgttcgctattgtagaaattgtttttcacagttgctcaaaaacgatggcagtgacttatgagttacgttacactttggagtctcatctttagtaaacatatcataatattcgatattacgagttgacatatcgaacaaattccaagtatttgattttggataatattcgtattttgcatctgctataattaagatataatcaccgcaagaacacacgaacatctttcctacatggttaaagtacatgtacaattctatccatttgtcttccttaactatatatttgtatagataattacgagtctcgtgagtaattccagtaattacatagatgtcgccgtcgtactctacagcataaactatactatgatgtctaggcatgggagacttttttatccaacgatttttagtgaaacattccacatcgtttaatactacatatttttcatacgtggtataaactccacccattacatatatatcatcgtttacgaataccgacgcgcctgaatatctaggagtaattaagtttggaagtcttatccatttcgaagtgccgtgtttcaaatattctgccacacccgttgaaatagaaaattctaatcctcctattacatataactttccattgttaacacaagtactaacttctgattttaacgacgacatattagtaaccgttttccattttttcgtttcaagatctacccgcgatacggaataaacatgtctattgttaatcatgccgccaataatgtatagacaattatgtaaaacatttgcattatagaattgtctatctgtattaccgactatcgtccaatattctgttctaggagagtaatgggttattgtggatatataatcagagtttttaatgactactatattatgttttataccatttcgtgtcactggctttgtagatttggatatagttaatcccaacaatgatatagcattgcgcatagtattagtcataaacttgggatgtaaaatgttgatgatatctacatcgtttggatttttatgtatccactttaataatatcatagctgtaacatcctcatgatttacgttaacgtcttcgtgggataagatagttgtcagttcatcctttgataattttccaaattctggatcggatgtcaccgcagtaatattgttgattatttctgacatcgacgcattatatagttttttaattccatatcttttagaaaagttaaacatccttatacaatttgtggaattaatattatgaatcatagtttttacacatagatctactacaggcggaacatcaattattatggcagcaactagtatcatttctacattgtttatggtgatgtttatcttcttccagcgcatatagtctaatagcgattcaaacgcgtgatagtttataccattcaatataatcgcttcatcctttagatggtgatcctgaatgcgtttaaaaaaattatacggagatgccgtaataatttccttattcacttgtataatttccccattgatagaaaatatcacgctttccattcttgaagtactataagtaattatagtataatgtaaaggtttatatattcaatattttttataaaaaaatcatttcgacattaattcctttttaaatttccgtctatcatctatagaaacatattctatgaatttataaaatgcttttacgtgtcctatcgtaggcgatagaaccgctaaaaagcctattgaatttctacaaaagaatctattatatggtatagggagagtataaaacattaaatgcccgtacttattaaagtattcagtagccaatcctaactctttcgaatacttattaatggctcttgttctgtacgaatctatttttttgaacaacggacctagtggtatatcttgttctatgtatctaaaataatgtctgactagatccgttagtttaatatcctcagtcatcttgtctagaatggcaaatctaactgcgggtttaggctttagtttagtttttatatctacatctatgtctttatctaacaccaaaaatataatagctaatattttattacaatcatccggatattcttctacgatctcactaactaatgtttctttggttatactagtatagtcactatcggacaaataaagaaaatcagatgatcgatgaataatacatttaaattcatcatctgtaagatttttgagatgtctcattaaaatattattagggtcagtactcattatcattaggcagctattacttattttattatttttcaccatatagatcaatcattagatcatcaaaatatgtttcaatcatcctaaagagtatggtgaatgactcttcccatctaatttctgaacgttcaccaatgtctctagccactttggcactaatagcgatcattcgcttagcgtcttctatattattaactggttgattcaatctatctagcaatggaccgtcggacagcgtcattctcatgttcttaatcaatgtacatacatcgccgtcatctaccaattcatccaacaacataagctttttaaaatcatcattataataggtttgatcgttgtcatttctccaaagaatatatctaataagtagagtcctcatgcttagtaatttaactattttagttaacaactattttttatgttaaatcaattagtacaccgctatgtttaatacttattcatattttagtttttaggattgagaatcaatacaaaaattaatgcatcattaattttagaaatacttagtttccacgtagttaatgaaacatttgaactcatcgtacaagacgttctcgtacaggacgtaactataaaccggtttatatttgttcaagatagatacaaatccgataactttttttacgaattctacgggatccactttaaaagtgtcataccgggttctttttatttttttaaacagatcaatggtgtgatgttgattaggtcttttacgaatttgatatagaatagcgtttacatattctccataatggtcaatcgccatttgttcgtatgtcataaattctttaattatatgacactgtgtattgtttagttcatccttgttcattgttaggaatctatccaaaatggcaattatactagaactataggtgcgttgtatacacatattgatgtgtctgtttatacaatccatgatatttggatccatgctactaccttcgggtaaaattgtagcatcatataccatttctagtactttaggttcattattatccattgcagaggacgtcatgatcgcatcctaaaaaaatatattatttttatgttattttgttaaaaataatcatcgaatacttcgtaagatactccttcatgaacataatcagttacaaaacgtttatatgaagtaaagtatctacgatttttacaaaagtccggatgcataagtacaaagtacgcgataaacggaataataatagatttatctagtctatctttttctatagctttcatagttagatacatggtctcagaagtaggattatgtaacatcagcttcgataaaatgactgggttatttagtcttacacattcgctcatacatgtatgaccgttaactacagagtctacactaaaatgattgaacaatagatagtctaccattgtttcgtattcagatagtacagcgtagtacatggcatcttcacaaattatatcattgtctaatagatatttgacgcatcttatggatcccacttcaacagccatcttaaaatcggtaaaatcatattgctttcctttatcattaataatttctaaaacatcatctctatcataaaagatacaaatattaactgtttgatccgtaataacattgctagtcgatagcaatttgttaataagatgcgctgggctcaatgtcttaataagaagtgtaagaggactatctccgaatttgttttgtttattaacatccgttgatggaagtaaaagatctataatgtctacattcttgactgttttagagcatacaatatggagaggtgtatttccatcatgatctggttttgagggactaattcctagtttcatcatccatgagattgtagaagcttttggattgtctgacataagatgtctatgaatatgatttttgccaaatttatccactatcctggcttcgaatccgatggacattatttttttaaacactctttctgaaggatctgtacacgccaacaacggaccacatccttcttcatcaaccgagttgttaatcttggctccatactgtaccaataaatttattctctctatgacttcatcatctgttcccgagagataatatagaggcgttttatgctgtttatcacacgcgtttggatctgcgccgtgcgtcagcagcatcgcgactattctattattattaattttagaagctatatgcaatggataatttccatcatcatccgtctcatttggagagtatcctctatgaagaagttcttcgacaaatcgttcatctagtcctttaattccacaatacgcatgtagaatgtgataattatttccagaaggttcgatagcttgtagcatattcctaaatacatctaaatttttactattatatttggcataaagagatagataatactcggccgacataatgttgtccattgtagtataaaaattaatatttctatttctatttctgtatatttgcaacaatttactctctataacaaatatcataacttagttcttttatgtcaagaaggcactggtttagttcatctataaatgtcacgccataactaccacgcatgctatactcagaattatgataaagatatttatccttggggtgtaggtaatggggattaatctttgttggatcagtctctaagttaacacatgtcacacatgatccatttatagttatatcacacgatgatgatttatgaattgattccggaagatcgctatcgtattttgtggttccacaattcatttccatacatgttattgtcacactaatattatgatgaactttatctagccgctgagtggtaaacaacagaacagatagtttattatctttaccaacaccctcagccgctgccacaaatctctgatccgtatccatgatggtcatgtttatttctagtccgtatccagtcaacactatgttagcatttctgtcgatatagctttcactcatatgacactcaccaataatagtagaattaatgtcgtaatttacaccaatagtgagttcggcggcaaagtaccaataccggtaatcttgtcgaggaggacatatagtattcttgtattctaccgaatacccgagagatgcgatacaaaagagcaagactaatttgtaaaccatcttactcaaaatatgtaacaatagtacgatgcaatgagtaagacaataggaaatctatcttatatacacataattattctatcaattttaccaattagttagtgtaatgttaacaaaaatgtgggagaatctaattagtttttctttacacaattgacgtacatgagtctgagttccttgtttttgctaattatttcatccaatttattattcttgactatatcgagatcttttgtataggagtcagacttgtattcaacatgcttttctataatcattttagctatttcggcatcatccaatagtacattttccagattagcagaatagatattaatgtcgtatttgaacagagcctgtaacatctcaatgtctttattatctatagccaatttaatgtccggaatgaagagaagggaattattggtgtttgtcgacgtcatatagtcgagcaagagaatcatcatatccacgtgtccattttttatagtggtgtgaatacaactaaggagaatagccagatcaaaagtagatggtatttctgaaagaaagtatgatacaatacttacatcattaagcatgacggcatgataaaatgaagttttccatccagttttcccatagaacatcagtctccaatttttcttaacaaacagttttaccgtttgcatgttaccactatcaaccgcataatacaatgcagtgtttcccttgtcatcaaattgtgaatcatccagtccactgaatagcaaaatctttactattttggtatcttccaatgtggctgcctgatgtaatggaaattcattctctagaagatttttcaatgctccagcgttcaacaacgtacatactagacgcacgttattatcagctattgcataatacaaggcactatgtccatggacatccgccttaaatgtatctttactagagagaaagcttttcagctgcttagacttccaagtattaattcgtgacagatccatgtctgaaacgagacgctaattagtgtatattttttcattttttataattttgtcatattgcaccagaattaataatatctctaatagatctgattagtagatacatggctatcgcaaaacaacatatacacatttaataaaaataatatttattaagaaaattcagatttcacgtacccatcaatataaataaaataatgattccttacaccgtacccatattaaggagattccaccttacccataaacaatataaatccagtaatatcatgtctaatgatgaacacaaatggtgtattaaattccagtttttcaggagatgatctcgccgtagctaccataatagtagatgcctctgctacagttccttgttcgtcgacatctatctttgcattctgaaacattttataaatatataatgggtccctagtcatatgtttaaacgacgcattatctggattaaacatactaggagccatcatttcggctatcgacttaatatccctcttattttcgatagaaaatttagggagtttaagattgtacactttattccctaattgaaacgaccaatagtctaattttgcagccgtaatagaatctgtgaaatgggtcatattatcacctattgccaggtacatactaatattagcatccttatacggaaggcgtaccatgtcatattctttgtcatcgattgtgattgtatttccttgcaatttagtaactacgttcatcatgggaaccgttttcgtaccgtacttattagtaaaactagcattgcgtgttttagtgatatcaaacggatattgccatgtacctttaaaatatatagtattaatgattgcccatagagtattattgtcgagcatattagaatctactacattagacataccggatctacgttctactatagaattaattttattaaccgcatctcgtctaaagtttaatctatataggccgaatctatgatattgttgataatacgacggtttaatacacacagtattatctacgaaactttgataagttagatcagtgtacgtatatttagatgttttcagcttagctaatcctgatattaattctgtaaatgctggacccagatctctttttctcaaatccatagtcttcaataattctattctagtattacctgatgcaggcaatagcgacataaacatagaaaacgaatagccaaacggcgagaagacaatattatcatcttgaatatttttatacgctactataccggcattggtaaatccttgcagacgataggtagacgctgaacacgttaacgatagtatcaataacgcaatcatgattttatggtattaataattaaccttatttttatgttcggtataaaaaaattattgatgtctacacatccttttgtaattgacatctatatatccttttgtataatcaactctaatcactttaacttttacagttttccctaccagtttatccctatattcaacatatctatccatatgcatcttaacactctctgccaagatagcttcagagtgaggatagtcaaaaagataaatatatagagcataatccttctcgtatactctgccctttattacatcgcccgcattgggcaacgaataacaaaatgcaagcatcttgttaacgggctcgtaaattgggataaaaattatgtttttatatctattttattcaagagaatattcaggaatttctttttccggttgtatctcgtcgcagtatatatcatttgtacattgtttcatattttttaatagtttacaccttttagtaggactagtatcgtacaattcatagctgtattttgaattccaatcacgcataaaaatatcttccaattgttgacgaagacctaatccatcatccggtgtaatattaatagatgctccacatgtatccgtaaagtaatttcctgtccaatttgaggtacctatataggccgttttatcggttaccatatatttggcatggtttaccctagaatacggaatgggaggatcagcatctggtacaataaatagctttacttctatatctatgtttttagattttagcatagcgatagatcttaaaaagtttctcatgataaacgaagatcgttgccagcaactaatcaatagcttaacggatacttgtctgtctatagcggatcttcttaattcatcttctatataaggccaaaacaaaattttacccgccttcgaataaataatagggataaagttcataacagatacataaacgaatttactcgcatttctaatacatgacaataaagcggttaaatcattggttctttccatagtacatagttgttgcggcgcagaagcaataaatacagagtgtggaacaccacttacgttaatactaagaggatgatctgtattataatacgacggataaaagtttttccaattatatggtagattgttaactccaagataccagtatacctcaaaaatttgagtgagatccgctgccaagttcctattattgaagatcgcaatacccaattctttgacctgagttagtgatctccaatccatgttagcgcttcctaaataaatatgtgtattatcagatatccaaaattttgtatgaagaactcctcctaggatatttgtaatatctatgtatcgtacttcaactccggccatttgtagtctttcaacatcctttaatggtttgttagatttattgacggctactctaactcttactcctcttttgggtaattgtacaatctcgtttaatattatcgtgccgaaattcgtacccacttcatccgataaactccaataaaaagatgatatatctagtgtttttgtggtattggatagaatttccctccacatgttaaatgtagacaaatatactttatcaaattgcatacctataggaatagtctctgtaatcactgcgattgtattatccggattcattttatttgttaaaaaataatcctatatcacttcactctattaaaaatccaagtttctatttctttcatgactgattttttaacttcatccgtttccttatgaagatgatgtttggcaccttcataaatttttatttctctattacaatttgcatgttgcatgaaataatatgcacctaaaacatcgctaatctcattgtttgttccctggagtatgagagtcgggggggtgttaatcttggaaattatttttctaaccttgttggtagccttcaagacctgactagcaaatccagccttaattttttcatgattgattaatgggtcgtattggtatttataaactttatccatatctctagatactgattctggacatagctttccgactggcgcatttggtgtgatggttcccataagtttggcagctagcagattcagttttgaaacagcatctgcattaactagaggagacattagaatcattgctgtaaacaagtttggattatcgtaagaggctagtatagaaattgttgctcccatggaatgacccaataagtagatttaatagttaccacgtgctgtaccaaagtcatcaatcatcattttttcaccattacttcttccatgtccaatatgatcatgtgagaatactaaaattcctaacgatgatatgttttcagctagttcgtcataacgtccagaatgtttaccagctccatgacttatgaatactaatgccttaggatatgtaataggtttccaatatttacaatatatgtaatcattgtccagattgaacatacagtttgcactcatgattcacgttatataactatcaatattaacagttcgtttgatgatcatattatttttatgttttattgataattgtaaaaacatacaattaaatcaatatagaggaaggagacggatactgtcttttgtgagatagtcatggcgactaaatcagattatgaggatgctgttttttactttgtggatgatgataaaatatgtagtcgcgactccatcatcgatctaatagatgaatatatcacgtggagaaatcatgttatagtgtttaacaaagatattaccagttgtggaagactgtacaaggaattgatgaagttcgatgatgccgctatacagtactatggtattgataaaattaatgagattgtcgaagctatgagcgaaggagaccactacatcaattttacaaaagtccatgatcaggaaagtttattcgctaccataggaatatgtgctaaaatcactgaacattggggatacaaaaagatttcagaatctagattccaatcattgggaaacattacagatctgatgaccgacgataatataaacatcttgatactttttctagaaaaaaaattgaattgatgatataggggtcttcataacgcataattattacgttagcattctatatccgtgttaaaaaaaattatcctatcatgtatttgagagttttatatgtagcaaacatgatagctgtgatgccaataagctttagatattcacgcgtgctagtgttagggatggtattatctggtggtgaaatgtccgttatataatctacaaaacaatcatcgcatatagtatgcgatagtagagtaaacatttttatcgtttctactgggttcatacatcgtctacccaattcggttatgaatgaaattgtcgccaatcttacacccaaacccttgttatccattagcatagtattaacttcgttatttatgtcataaactgtaaatgattctgtagatgccatatcatacatgatattcatgtccctattataatcattactaactttatcacaatatatgttgataatatctatatatgatctagtctttgtgggcaactgtctatacaagtcgtctaaacgttgtttactcatatagtatcgaacagccatcattacatggtcccgttccgttgatagataatcgagtatgttagtggacttgtcaaatctatataccatattttctggaagtggatatacatagtcgtgatcaacattattgctagcctcatcttctatatcctgtactataccattatctatatcatctacataatctacgatattattatacataaacatcgacaacatactattgtcaattatctaagtcctgttgatccaaacccttgatctcctctatctgtactatctagagattgtacttcttccagttctggataatatatacgttgatagattagctgggctattctatcccccgtatttacattaaacgtacattttccattattaataagaataactcctatgtttcccctataatcttcgtctattacaccgcctcctatatcaatgccttttagggacagaccagacctaggagctattctaccatagcagaacttaggcatggacatactaatatctgtcttaattaactgtcgttctccaggagggatagtataatcgtaagcgctatataaatcatatccggcggcgtaaggtgattgcctagtaggagatttagctctgttagtttccttaacaaatctaactggtgagttaatattcatgttgaacataaaactaatattttatttcaaaattatttaccatcccatatattccatgaataagtgtgatgattgtacacttctatagtatctatatacgattcacgataaaatcctcctatcaatagcagtttattatccactatgatcaattctggattatccctcggataaataggatcatctatcagagtccatgtattgctggattcacaataaaattccgcatttctaccaaccaagaataaccttctaccgaacactaacgcgcatgatttataatgaggataataagtggatggtccaaactgccactgatcatgattgggtagcaaatattctgtagttgtatcagtttcagaatgtcctcccattacgtatataacattgtttatagatgccactgctggattacatctaggtttcagaagactcggcatattaacccaagcagcatccccgtggaaccaacgctcaacagatgtgggatttggtagacctcctactacgtataatttattgttagcgggtatcccgctagcatacagtctggggctattcatcggaggaattggaatccaattgtttgatatataatttacagctatagcattgttatgtatttcattgttcatccatccaccgatgagatatactacttctccaacatgagtacttgtacacatatggaatatatctataatttgatccatgttcataggatactctatgaatggatacttgtatgatttgcgtggttgtttatcacaatgaaatattttggtacagtctagtatccattttacattatttatacctctgggagaaagataatttgacctgattacatttttgataaggagtagcagatttcctaatttatttcttcgctttatataccacttaatgacaaaatcaactacataatcctcatctggaacatttagttcatcgctttctagaataagtttcatagatagataatcaaaattgtctatgatgtcatcttccagttccaaaaagtgtttggcaataaagtttttagtatgacataagagattggatagtccgtattctatacccatcatgtaacactcgacacaatattcctttctaaaatctcgtaagataaagtttatacaagtgtagatgataaattctacagaggttaatatagaagcacgtaataaattgacgacgttatgactatctatatatacctttccagtatatgagtaaataactatagaagttaaactgtgaatgtcaaggtctagacaaacccttgtaactggatctttatttttcgtgtatttttgacgtaaatgtgtgcgaaagtaaggagataactttttcaatatcgtagaattgactattatattgccacctatagcatcaataattgttttgaatttcttagtcatagacaatgctaatatattcttacagtacacagtattaacaaatatcggcatttatgtttctttaaaagtcaacatctagagaaaaatgattatctttttgagacataactcccattttttggtattcacccacacgtttttcgaaaaaattagtttttccttccaatgatatattttccatgaaatcaaacggattggtaacattataaatttttttaaatcccaattcagaaatcaatctatccgcgacgaattctatatatgttttcatcatttcacaattcattcctataagtttaactggaagagccgcagtaagaaattcttgttcaatggatactgcatctgttataatagatctaacggtttcttcactcggtggatacaataaatgtttaaacatcaaacatgcgaagtcgcagtgtagaccctcgtctctactaattagttcgttggaaaacgtgagtccgggcattaggccacgctttttaagccaaaatatggaagcgaatgatccggaaaagaagattccttctactgcagcaaaggcaataagtctctctccataaccggcgctgtcatgtatccacttttgagcccaatcggccttcttttttacacaaggcattgtttctatggcattaaagagatagtttttttcattactatctttaacataagtatcgatcaaaagactatacatttccgaatgaatgttttcaatggccatctgaaatccgtagaaacatctagcctcggtaatctgtacttctgtacaaaatcgttccgccaaattttcattcactattccgtcactggctgcaaaaaacgccaatacatgttttataaaatatttttcgtctggtgttagtttattccaatcattgatatctttagatatatctacttcttccactgtccaaaatgatgcctctgcctttttatacatgttccagatgtcatgatattggattgggaaaataacaaatctatttggatttggtgcaaggatgggttccataactaaattaacaatatcaataaattttttttcagttatctatatgcctgtacttggattttttgtacatcgatatcgccgcaatcactacaataattacaagtattattgatagcattgttattagtactatcataattaaattatcgacattcatgggtgctgaataatcgttattatcatcattatcattttgtaattgtgacatcatactaaataaatcgtttgcgagattgttgtgggaagcgggcatggaggatgcattatcattattatttaacgccttccatttggattcacaaatatggcgcgcgttcaacattttatggaaactataattttgtgaaaacagataacaagaaaactcgtcatcgttcaaatttttaacgatagtaaaccgattaaacgtcgagctaatttctaacgctagcgactctgttggatatgggtttccagatatatatcttttcagttcccctacgtatctataatcatctgtaggaaatggaagatatttccatttatctactgttcctaatatcatatgtggtggtgtagtagaaccattaagcgcgaaagatgttatttcgcatcgtattttaacttcgcaataatttctggttagataacgcactctaccagtcaagtcaatgatattagcctttacagatatattcatagtagtcgtaacgatgactccatcttttagatgcgatactcctttgtatgtaccagaatcttcgtacctcaaactcgatatatttaaacaagttaatgagatattaacgcgttttatgaatgatgatatataaccagaagttttatcctcggtggctagcgctataaccttatcattataataccaactagtgtgattaatatgtgacacgtcagtgtgggtacaaatatgtacattatcgtctacgtcgtattcgatacatccgcatacagccaacaaatataaaatgacaaatactctaacgccgttcgtacccatcttgatgcggtttaataaatgttttgatttcaatttattgtaaaaaaagattcggttttatactgttcgatattctcattgcttatattctcatctatcatctccacacagtcaaatccgtggttagcatgcacctcatcaaccggtaaaagactatcggactcttctatcattataactctagaatatttaatttggtcattattaatcaagtcaattatcttatttttaacaaacgtgagtattttactcattttttataaaaacttttagaaatatacagactctatcgtgtgtctatatcttctttttatatccaatgtatttatgtctgatttttcttcatttatcatatataatggtccaaattctacacgtgcttcggattcatccagatcattaaggttcttataattgtaacatccttctcttccctcttctacatcttccttcttattcttattcttagcgtcacagaatctaccacagcaggatcccatgacgagcgtcatattaaactaatccattttcaattataatatatgattagtaatgaccattaaaataaaaaatattcttcataaccggcaagaaagtgaaaagttcacattgaaactatgtcagtagtatacatcatgaaatgatgatatatatatactctattttggtggaggattatatgatataattcgtggataatcattcttaagacacatttcttcattcgtaaatcttttcacgttaaatgagtgtccatattttgcaatttcttcatatgatggcggtgtacgtggacgaggctgctcctgttcttgttgtggtcgccgactgtcgtgtttgcgtttatccctccattatcgcgattgcgtagatggagtactattatataccttgtaattaaatttttttattaattaaacgtataaaaacgttccgtatctgtatttaagagccagatttcgtctaatagaacaaatagctacagtaaaaataactagaataattgctacacccactagaaaccacggatcgtaatacggcaatcggttttcgataataggtggaacgtatattttatttaaggacttaacaattgtctgtaaaccacaatttgcttccgcggatcctgtattaactatctgtaaaagcatatgttggccgggcggagccgaacattctccgatatccaatttctgtatatctataatattattaacctccgcatacgcattacagttcttttctagcttggataccgcactaggtacatcgtctagatctattcctatttcctcagcgatagctcttctatccttttccggaagcaatgaaatcacttcaataaatgattcaaccatgagtgtgaaactaagtcgagaattactcatgcatttgttagttattcggagcgcgcaatttttaaactgtcctataacctctcctatatgaatagcacaagtgacattagtagggatagaatgttgagctaatttttgtaaataactatctataaaaagattatacaaagttttaaactctttagtttccgccatttatccagtctgagaaaatgtctctcataataaatttttccaagaaactaattgggtgaagaatggaaacctttaatctatatttatcacagtctgttttggtacacatgatgaattcttctaatgccgtactaaattcgatatctttttcgatttctggatatgtttttaataaagtatgaacaaagaaatggaaatcgtaataccagttatgtttaactttgaaattgttttttattttcttgttaatgattccagccacttgggaaaagtcaaagtcgtttaatgccgatttaatacgttcattaaaaacaaactttttatcctttagatgaattattattggttcattggaatcaaaaagtaagatattatcgggtttaagatctgcgtgtaaaaagttgtcgcagcatggtagttcgtagattttaatgtataacagagccatctgtaaaaagataaactttatgtattgtaccaaagatttaaatcctaatttgatagctaactcggtatctactttatctgccgaatacagtgctaggggaaaaattataatgtttcctctttcgtattcgtagttagttctcttttcatgttcgaaaaagtgaaacatgcggttaaaatagtttataacattaatattactgttaataactgccgggtaaaagtgggatagtaatttcacgaatttgatactgtcctttctctcgttaaacgcctttagaaaaactttagaagaatatctcaatgatagttcctgaccatccatagtttgtatcaataatagcaacatatgaagaacacgtttatacagagtatgtaaaaatgttaatttatagtttaatcccatggcccacgcacacacgattaattttttttcatctccctttagattgttgtatagaaatttgggtactgtgaactccgccgtagtttccatgggactatataattttgtggcctcgaatacaaattttactacatagttatctatcttaaaaactataccatatcctcctgtagatatgtgataaaaatcgtcgtttataggataaaatcgtttatccttttgttggaaaaaggatgaattaatgtaatcattctcttctatctttagtagtgtttccttattaaaattcttaaaataatttaacaatctaactgacggagcccaattttggtgtaaatctaattgggacattatattgttaaaatacaaacagtctcctaatataacagtatctgataatctatggggagacatccattgatattcaggggatgaatcattggcaacacccatttattgtacaaaaagccccaatttacaaacgaaagtccaggtttgatagagacaaactattaactattttgtctctgtttttaacacctccacagtttttaatttctttagtaatgaaattattcacaatatcagtatcttctttatctaccagagattttactaacttgataaccttggctgtctcattcaatagggtagtaatatttgtatgtgtgatattgatatctttttgaattgtttcttttagaagtgattctttgatggtgccagcatacgaattacaataatgcagaaactcggttaacatgcaggaattatagtaagccaattccaattgttgcctgtgttgtattagagtgtcaatatgagcaatggtgtccttgcgtttctctgatagaatgcgagcagcgattttggcgttatcatttgacgatatttctggaatgacgaatcctgtttctactaactttttggtaggacaaagtgaaacaatcaagaagatagcttctcctcctatttgtggaagaaattgaactcctctagatgatctactgacgatagtatctccttgacagatattggaccgaattacagaagtacctggaatgtaaagccctgaaaccccctcattttttaagcagattgttgccgtaaatcctgcactgtgaccaagatagagagctcctttggtgaatccatctctatgtttcagtttaaccaagaaacagtcagctggtctaaaatttccatctctatctaatacagcatctaacttgatgtcaggaactatgaccggtttaatgttatatgtaacattgagtaaatccttaagttcataatcatcactgtcatcagttatgtacgatccaaacaatgtttctactggcatagtggatacgaagatgctatccatcagaatgtttccctgattagtattttctatatagctattcttctttaaacgattttccaaatcagtaactatgttcatttttttaggagtaggacgcctagccagtatggaagaggattttctagatcctctcttcaacatctttgatctcaatggaatgcaaaaccccatagtgaaacaaccaacgataaaaataatattgtttttcactttttataattttaccatctgactcatggattcattaatatctttataagagctactaacgtataattctttataactgaactgagatatatacaccggatctatggtttccataattgagtaaatgaatgctcggcaataactaatggcaaatgtataaaacaacgaaattatactagagttgttaaagttaatattttctatgagctgttccaataaattatttgttgtgactgcgttcaagtcataaatcatcttgatactatccagtaaacagtctttaagttctggaatattatcatcccattgtaaagcccctaattcgactatcgaatatcctgctctgatagcagtttcaatatcgacggacgtcaatactgtaataaaggtggtagtattgtcatcatcgtgataaactacgggaatatggtcgttagtaggtacggtgactttacacaacgcgatatataactttccttttgtaccatttttaacgtagttgggacgtcctgcagggtattgttttgaagaaatgatatcgagaacagatttgatacgatatttgttggattcctgattattcactataatataatctagacagatagatgattcgataaatagagaaggtatatcgttggtaggataatacatccccattccagtattctcggatactctattgatgacactagttaagaacatgtcttctattctagaaaacgaaaacatcctacatggactcattaaaacttctaacgctcctgattgtgtctcgaatgcctcgtacaaggatttcaaggatgccatagattctttgaccaacgatttagaattgcgtttagcatctgatttttttattaaatcgaatggtcggctctctggtttgctaccccaatgataacaatagtcttgtaaagataaaccgcaagaaaatttatacgcatccatccaaataaccctagcaccatcggatgatattaatgtattattatagattttccatccacaattattgggccagtatactgttagcaacggtatatcgaatagattactcatgtaacctactagaatgatagttcgtgtactagtcataatatctttaatccaatctaagaaatttaaaattagattttttacactgttaaagttaacaaaggtattacccggatacgtggatatcatatatggcattggtccattatcagtaatagctccataaactgatacggcgatggtttttatatgtgtttgatctaacgaggaagaaattcgcgcccacaattcatctctagatatgtatttaatatcaaacggtaacacatcaatttcgggacgcgtatatgtttctaaatttttaatccaaatataatgatgacctatatgccctattatcatactgtcaactatagtacacctagagaacttacgatacatctgtttcctataatcgttaaattttacaaatctataacatgctaaaccttttgacgacaaccattcattaatttctgatatggaatctgtattctcgataccgtattgttctaaagccagtgctatatctccctgttcgtgggaacgctttcgtataatatcgatcaacggataatctgaagtttttggagaataatatgactcatgatctatttcgtccataaacaatctagacataggaattggaggcgatgatcttaattttgtgcaatgagtcgtcaatcctataacttctaatattgtaatattcatcatcgacataacactatctatgttatcatcgtatattagtataccacggccttcttcatttcgtgccaaaataatatacagtcttaaataattacgcaatatctcaatagtttcataattgttagctgttttcatcaaggtttgtatcctgtttaacatgatggcgttctataacgtctctattttctatttttaattttttaaatttttaacgatttactgtggctagatacccaatctctctcaaatatttttttagcctcgcttacaagctgtttatctatactattaaaactgacgaatccgtgattttggtaatgggttccgtcgaaatttgccgaagtgatatgaacatattcgtcgtcgactatcaacaattttgtattattctgaatagtgaaaaccttcacagatagatcattttgaacacacaacgcgtctagacttctggcggttgccatagaatatacgtcgttcttatcccaattaccaactagaagtctgatcttaactcctctattaatggctgcttctataatggagttgtaaatgtcaggccaatagtagctattaccgtcgacacgtgtagtgggaactatggccaaatgttcaatatctatactagtcttagccgacttgagtttatcaataactacatcagtgtctagatctctagaatatcccaataggtgttctggagaatcagtaaagaacactccacctataggattcttaatatgatacgcagtgctaactggcagacaacaagccgcagagcataaattcaaccatgaattttttgcgctattaaaggctttaaaagtatcaaatcttctacgaagatctgtggccagcgggggataatcagaatatacacctaacgttttaatcgtatgtatagatcctccagtaaatgacgcgtttcctacataacatctttcatcatctgacacccaaaaacaaccgagtagtagtcccacattattttttttatctatattaacggttataaaatttatatccgggcagtgactttgtagctctcccagatttcttttccctcgttcatctagcaaaactattattttaatccctttttcagatgcctcttttagtttatcaaaaataagcgcgcccctagtcgtactcagaggattacaacaaaaagatgctatgtatatatatttcttagctagagtgataatttcgttaaaacattcaaatgttgttaaatgatcggatctaaaatccatattttctggtagtgtttctaccagcctacattttgctcccgcaggtaccggtgcaaatggccacatttagttaacataaaaacttatacatcctgttctatcaacgattctagaatatcatcggctatatcgctaaaattttcatcaaagtcgacatcacaacctaactcagtcaatatattaagaagttccatgatgtcatcttcgtttatttctatatccgtatccattgtagattgttgaccgattatcgagtttaaatcattactaatactcaatccttcagaatacaatctgtgtttcattgtaaatttataggcggtgtatttaagttggtagattttcaattatgtatcaatatagcaacagtagttcttgctcctccttgattctagcatcctcttcattattttcttctacgtacataagcatgtccaatacgttagacaacacaccgacgatggcggccgccacagacacgaatatgactagaccgatgaccatttaaaaacccctctctagctttcacttaaactgtatcgattattcttttagaacatgtataatataaaaacattattctatttcgaatttaggcttccaaaaatttttcatccgtaaaccgataataatatatatagacttgttaatagtcggaataaatagattaatgcttaaactatcatcatctccacgattagagatacaatatttacattctttttgctgtttcgaaactttatcaatacacgttaatacaaacccaggaaggagatattgaaactgaggctgttgaaaatgaaacggtgaatacaataattcagataatgtaaaatcatgattccgtattctgatgatattagaactgctaatggatgtcgatggtatgtatctaggagtatctattttaacaaagcatcgatttgctaatatacaattatcattttgattaattgttattttattcatattcttaaaaggtttcatatttatcaattcttctacattaaaaatttccatttttaatttatgtagccccgcaatactcctcattacgtttcattttttgtctataatatccattttgttcatctcggtacatagattatccaattgagaagcgcatttagtagttttgtacattttaagtttattgacgaatcgtcgaaaactagttatagttaacattttattatttgataccctgatattaatacccctgccgttactattatttataactgatgtaacccacgtaacattagaattaattatcgatagtaatgcatcgacgcttccaaaattgtctattataaactcaccgataatttttttattgcatgttttcatattcattaggattatcaaatctttaatcttattacgattgtatgcgttgatattacaagacgtcattctaaaagacggaggatctccatcaaatgccagacaatcacgtacaaagtacatggaaataggttttgttctattgcgcatcatagattcatatagaacacccatagaaatactaatttgttttactctataaaatactaatgcatctatttcatcgttttgtataacgtctttccaagtgccaaattccaaatttttttcattgatagtaccaaattcttctatctctttaactacttgcatagataggtaattacagtgatgcctacatgccgttttttgaaactgaatagatgcgtctagaagcgatgctacactagtcacaatcaccactttcatatttagaatatatgtatgtaaaaatatagtagaatttcattttgtttttttctatgctataaatgaattctcattttgcatctgctcatactccgttttatatcaataccaaagaaggaagatatctggttctaaaagccgttaaagtatgcgatgttagaactgtagaatgcgaaggaagtaaagcttcctgcgtactcaaagtagataaaccctcatcgcccgcgtgtgagagaagaccttcgtccccgtccagatgcgagagaatgaataaccctggaaaacaagtcccgtttatgaggacggacatgctacaaaatatgttcgcggctaatcgcgataatgtagcttctagacttttgtcctaaaatactattatatccttttcgatattaataaatccgtgtcgtccaggttttttatctctttcagtatgtgaatagataggtattttatctctattcatcatcgaatttaagagatccgataaacattgtttgtattctccagatgtcagcatctgatacaacaatatatgtgcacataaacctctggcacttatttcatgtaccttccccttatcactaaggagaatagtatttgagaaatatgtatacatgatattatcatgaattagatatacagaatttgtaacactctcgaaatcacacgatgtgtcggcgttaagatctaatatatcactcgataacacattttcatctagatacactagacattttttaaagctaaaatagtctttagtagtgacagtaactatgcgattattttcatcgatgatacatttcatcggcatattattacgcttaccatcaaagactataccatgtgtatatctaacgtattctagcatggttgccatacgtgcattaaacttttcaggatctttggatagatcttccaatctatctatttgagaaaacatttttatcatgttcaatagttgaaacgtcggatccactatatagatattatctataaagattttaggaactacgttcatggtatcctggcgaatattaaaactatcaatgatatgattatcgttttcatcttttatcaccatatagtttctaagatatgggattttacttaatataatattatttcccgtgataaattttattagaaaggccaaatctataagaaaagtcctagaattagtctgaagaatatctatatcgccgtaccgtatatttggattaattagatatagagaatatgatccgtaacatatacaacttttattatggcgtctaagatattcttccatcaacttattaacatttttgactagggaagatacattatgacgtcccattacttttgccttgtctattactgcgacgttcatagaatttagcatatctcttgccaattcttccattgatgttacattataagaaattttagatgaaattacatttggagctttaatagtaagaactcctaatatgtccgtgtatgtggtcactaatacagattgtagttctataatcgtaaataatttacctatattatatgtttgagtctgtttagaaaagtagctaagtatacgatcttttatttctgatgcagatgtatcaacatcggaaaaaaatctttttttattcttttttactaaagatacaaatatgtctttgttaaaaacagttattttctgaatatttctagcttgtaattttaacatatgatattcgttcacactaggtactctgcctaaataggtttctataatctttaatgtaatattaggaagagtattctgatcaggattcctattcattttgaggatttaaaactctgattattgtctaatatggtctcaacacaaactttttcacagagcgatagagtttttgataactcgtttttcttaagaaatataaaactactgtttccagagctcgctctatcttttattttatctaattcgatacaaactcctgatactggttcagaaagtaattcattaattttcagtcctttatagaagatatttaatatagataatacaaaattttcagttcttgatatcgatctgattgatcctagaactagatatattaataacgtgctcattaggcagtttatggcagcttgataattagatatagtatattccagttcatatttattagataccgcattgcccagattttgatattctatgaattcctctgaaaataaatccaaaataactagacattctattttttgtggattagtgtactctcttccctctatcatgttcactactggtgtccacgatgataaatatctagagggaatataatatagtccataggatgccaatctagcaatgtcgaataactgtaatttgattcttcgttcttcattatgaattgattcttgaggtataaacctaacacaaattatattattagacttttcgtatgtaatgtctttcatgttataagtttttaatcctggaatagaatctattttaatgaggcttttaaacgcagagttctccaacgagtcaaagcataatactctgttgtttttcttatatacgatgttacgattttcttctttgaatggaataggtttttgaattagtttataattacaacataatagataaggaagtgtgcaaatagtacgcggaaaaaacataatagctcccctgttttcatccatggttttaagtaaatgatcactggcttctttagtcaatggatattcgaacattaaccgtttcatcatcattggacagaatccatatttcttaatgtaaagagtgatcaaatcattgtgtttattgtaccatcttgttgtaaatgtgtattcggttatcggatctgctcctttttctattaaagtatcgatgtcgatctcgtctaagaattcaactatatcgacatatttcatttgtatacacataaccattactaacgtagaatgtataggaagagatgtaacgggaacagggtttgttgattcgcaaactattctaatacataattcttctgttaatacgtcttgcacgtaatctattatagatgccaagatatctatataattattttgtaagatgatgttaactatgtgatctatataagtagtgtaataattcatgtatttcgatatatgttccaactctgtctttgtgatgtctagtttcgtaatatctatagcatcctcaaaaaatatattcgcatatattcccaagtcttcagttctatcttctaaaaaatcttcaacgtatggaatataataatctattttacctcttctgatatcattaatgatatagtttttgacactatcttctgtcaattgattcttattcactatatctaagaaacggatagcgtccctaggacgaactactgccattaatatctctattatagcttctggacataattcatctattataccagaattaatgggaactattccgtatctatctaacatagttttaagaaagtcagaatctaagacctgatgttcatatattggttcatacatgaaatgatctctattgatgatagtgactatttcattctctgaaaattggtaactcattctatatatgctttccttgttgatgaaggatagaatatactcaatagaatttgtaccaacaaactgttctcttatgaatcgtatatcatcatctgaaataatcatgtaaggcatacatttaacaattagagacttgtctcctgttatcaatatactattcttgtgataatttatgtgtgaggcaaatttgtccacgttctttaattttgttatagtagatatcaaatccaatggagctacagttcttggcttaaacagatatagtttttctggaacgaattctacaacattattataaaggactttgggtagataagtgggatgaaatcctattttaattaatgcgatagccttgtcctcgtgcagatatccaaacgcttttgtgatagtatggcattcattgtctagaaacgctctacgaatatctgtgacagatatcatctttagagaatatactagtcgcgttaatagtactacaatttgtattttttaatctatctcaataaaaaaattaatatgtatgattcaatgtataactaaactactaactgttattgataactagaatcagaatctaatgatgacgtaaccaagaagtttatctactgccaatttagctgcattatttttagcatctcgtttagattttccatctgccttatcgaatactcttccgtcgatgtctacacaggcataaaatgtaggagagttactaggccccactgattcaatacgaaaagaccaatctctcctagtaatttggcagtactcattaataacggtgacagggttagcacctttccaatcaataatttttttagccggaataacatcatcaaaagacttatgatcctctctcattgatttttcgcgggatacatcatctattatggcgtcagccataacatcagcatccggcttatccgcctccgttgtcataaaccaacgaggaggaatatcgtcggagctgtacaccatagcactacgttgaagatcgtacagagctttattaacttctcgcttctccatattaagttgtctagttagttgtgcagcagtagctccttcgattccaatggttttaatagcctcacacacaatctctgcgttagaacgttcgtcgatatagattttagacatttttagagagaactaacacaaccagcaataaaactgaacctactttatcatttttttattcatcatcctctggtggttcgtcgttcctatcgaatgtggatctgattaacccgtcatctataggtgatgctggttctggagattctggaggagatggattattatctggaagaatctctgttatttccttgttttcatgtatcgattgcgttgtaacattaagattgcgaaatgctctaaatttgggaggcttaaagtgttgtttgcaatctctacacgcatgtctaactagtggaggttcgtcagcggctctagtttgaatcatcatcggcgtagtattcctacttttacagttaggacacggtgtattgtatttctcgtcgagaacgttaaaataatcgttgtaactcacatcctttattttatctatattgtattctactcctttcttaatgcattttataccgaataagagatagcgaaggaattctttttcggtgccgctagtacccttaatcatatcacatagtgttttatattccaaatttgtggcaatagacggtttatttctatacgatagtttgtttctggaatcctttgagtattctataccaatattattctttgattcgaatttagtttcttcgatattagattttgtattacctatattcttgatgtagtactttgatgatttttccatggcccattctattaagtcttccaagttggcatcatccacatattgtgatagtaattctcggatatcagtagcggctaccgccattgatgtttgttcattggatgagtaactactaatgtatacattttccatttataacacttatgtattaactttgttcatttatattttttcattattatgttgatattaacaaaagtgaatatatatgttaataattgtattgtggttatacggctacaatttcataatgagtggaagtcagtgtccgatgatcaatgacgatagctttactctgaaaagaaagtatcaaatcgatagtgcggagtcaacaataaaaatggataagaagaggataaagtttcagaatagagccaaaatggtaaaagaaataaatcagacaataagagcagcacaaactcattacgagacattgaaactaggatacataaaatttaagagaatgattaggactactactctagaagatatagcaccatctattccaaataatcagaaaacttataaactattctcggacatttcagccatcggcaaagcatcacagaatccgagtaagatggtatatgctctgctgctttacatgtttcccaatttgtttggagatgaccatagattcattcgttatagaatgcatccaatgagtaaaatcaaacacaagatcttctctcctttcaaacttaatcttattagaatattagtggaagaaagattctataataatgaatgcagatctaataaatggagaataattggaacacaagttgataaaatgttgatagctgaatctgataaatatacaatagatgcaaggtataacctaaaacccatgtatagaatcaagggaaaatctgaagaagataccctcttcatcaaacagatggtagaacaatgtgtgacatcccaggaattggtggaaaaagtgttgaagatactgtttagagatttgttcaagagtggagaatacaaagcatacagatacgatgatgatgtagaaaatggatttattggattggatacactaaaattaaacattgttcatgatatagttgaaccatgtatgcctgttcgtaggccagtggctaagatactgtgtaaagaaatggtaaataaatactttgagaatccgctacatattattggtaaaaatcttcaagagtgcattgactttgttagtgaataggcatttcatctttctccaatactaattcaaattgttaaattaataatggatagtataaatagttattagtgataaaatagtaaaaataattattagaataagagtgtagtatcatagataactctcttctataaaaatggattttattcgtagaaagtatcttatatacacagtagaaaataatatagattttttaaaggatgatacattaagtaaagtaaacaattttaccctcaatcatgtactagctctcaagtatctagttagcaattttcctcaacacgttattactaaggatgtattagctaataccaatttttttgttttcatacatatggtacgatgttgtaaagtgtacgaagcggttttacgacacgcatttgatgcacccacgttgtacgttaaagcattgactaagaattatttatcgtttagtaacgcaatacaatcgtacaaggaaaccgtgcataaactaacacaagatgaaaaatttttagaggttgccgaatacatggacgaattaggagaacttataggcgtaaattatgacttagttcttaatccattatttcacggaggggaacccatcaaagatatggaaatcatttttttaaaactgtttaagaaaacagacttcaaagttgttaaaaaattaagtgttataagattacttatttgggcatacctaagcaagaaagatacaggcatagagtttgcggataatgatagacaagatatatatactctatttcaacaaactggtagaatcgtccatagcaatctaacagaaacgtttagagattatatctttcccggagataagactagctattgggtgtggttaaacgaaagtatagctaatgatgcggatatcgttcttaatagacacgccattaccatgtatgataaaattcttagttatatatactctgagataaaacaaggacgcgttaataaaaacatgcttaagttagtttatatctttgagcctgaaaaagatatcagagaacttctgctagaaatcatatatgatattcctggagatatcctatctattattgatgcaaaaaacgacgattggaaaaaatattttattagtttttataaagctaattttattaacggtaatacatttattagtgatagaacgtttaacgaggacttattcagagttgttgttcaaatagatcccgaatatttcgataatgaacgaattatgtctttattctctacgagtgctgcggacattaaacgatttgatgagttagatattaataacagttatatatctaatataatttatgaggtgaacgatatcacattagatacaatggatgatatgaagaagtgtcaaatctttaacgaggatacgtcgtattatgttaaggaatacaatacatacctgtttttgcacgagtcggatcccatggtcatagagaacggaatactaaagaaactgtcatctataaaatccaagagtagacggctgaacttgtttagcaaaaacattttaaaatattatttagacggacaattggctcgtctaggtcttgtgttagatgattataaaggagacttgttagttaaaatgataaaccatcttaagtctgtggaggatgtatccgcattcgttcgattttctacagataaaaaccctagtattcttccatcgctaatcaaaactattttagctagttataatatttccatcatcgtcttatttcaaaggtttttgagagataatctatatcatgtagaagaattcttggataaaagcatccatctaaccaagacggataagaaatatatacttcaattgataagacacggtagatcatagaacagaccaaatatattattaataatttgtatatacatagatataattatcacatattaaaaattcacacatttttgataaatgggaactgctgcaacaattcagactcccaccaaattaatgaataaagaaaatgcagaaatgattttggaaaaaattgttgatcatatagttatgtatattagtgacgaatcaagtgattcagaaaataatcctgaatatattgattttcgtaacagatacgaagactatagatctctcattataaaaagtgatcacgagtttgtaaagctatgtaaaaatcatgcagagaaaagttctccagaaacgcaacaaatgattatcaaacacatatacgaacaatatcttattccagtatctgaagtactattaaaacctataatgtccatgggtgacataattacatataacggatgtaaagacaatgaatggatgctagaacaactctctaccctaaactttaacaatctccgcacatggaactcatgtagcataggcaatgtaacgcgtctgttttatacattttttagttatctgatgaaagataaactaaatatataagtataatcccattctaatactttaacctgatgtattacctgcatcttattagaatattaacctaactaaaagacataacataaaaactcattacatagttgataaaaagcggtaggatataaatattatggctgccaccgttccgcgttttgacgacgtgtacaaaaatgcacaaagaagaattctagatcaagaaacattttttagtagaggtctaagtagaccgttaatgaaaaacacatatctatttgataattacgcgtatggatggataccagaaactgcaatttggagtagtagatacgcaaacttagatgcaagtgactattatcccatttcgttgggattacttaaaaagttcgagtttctcatgtctctatataaaggtcctattccagtatacgaagaaaaagtaaatactgaattcatagccaatggatcgttctctggtagatacgtatcatatcttcgaaagttttctgctcttccaacaaacgagtttattagttttttgttactgacttccattccaatctataatatcttgttctggtttaaaaatactcagtttgatattactaaacacacattattcagatacgtctatacagataatgccaaacacctggcgttggctaggtatatgcatcaaacaggagactataagcctttgtttagtcgtctcaaagagaattatatatttaccggtcccgttccaataggtatcaaagatatagatcaccctaatcttagtagagcaagaagtccatccgattatgagacattagctaatattagtactatattgtactttaccaagtatgatccggtattaatgtttttattgttttacgtacctgggtattcaattactacaaaaattactccagccgtagaatatctaatggataaactgaatctaacaaagagcgacgtacaactgttgtaaattattttatgcttcgtaaaatgtaggttttgaaccaaacattctttcaaagaatgagatgcataaaactttattatccaatagattgactatttcggacgtcaatcgtttaaagtaaacttcgtaaaatattctttgatcactgccgagtttaaaacttctatcgataattgtctcatatgttttaatatttacaagttttttggtccatggtacattagccggacaaatatatgcaaaataatatcgttctccaagttctatagtttctggattatttttattatattcagtaaccaaatacatattagggttatctgcggatttataatttgagtgatgcattcgactcaacataaataattctagaggagacgatctactatcaaattcggatcgtaaatctgtttctaaagaacggagaatatctatacatacctgattagaattcatccgtccttcagacaacatctcagacagtctggttttgtacatcttaatcatattcttatgaaacttggaaacatctcttctagtttcactagtacctttattaattctctcaggtacagattttgaattcgacgatgccgagtatttcatcgttgtatatttcttcttcgattgcataatcagattcttatataccgcctcaaactctattttaaaattattaaacaatactctactattaatcagtcgttctaactctttcgctatttctatagacttatctacatcttgactgtctatctctgtaaacacggagtcggtatctccatacacgctacgaaaacgaaatctgtaatctataggcaacgatgttttcacaatcggattaatatctctatcgtccatataaaatggattacttaatggattggcaaaccgtaacataccgttagataactctgctccatttagtaccgattctagatacaagatcattctacgtcctatggatgtgcaactcttagccgaagcgtatgagtatagagcactatttctaaatcccatcagaccatatactgagttggctactatcttgtacgtatattgcatggaatcataaatggccttttcagttgaactggtagcctgttttaacatctttttatatctggctctctctgccaaaaatgttcttaatagtctaggaatggttccttctatcgatctatcgaaaattgctatttcagagatgaggttcggtagtctaggttcacaatgaaccgtaatatatctaggaggtggatatttctgaagcaatagctgattatttatttcttcttccaatctattggtactaacaacgacaccgactaatgtttccggagatagatttccaaagatacacacattaggatacagactgttataatcaaagattaatacattattactaaacattttttgttttggagcaaataccttaccgccttcataaggaaacttttgttttgtttctgatctaactaagatagttttagtttccaacaatagctttaacagtggacccttgatgactgtactcgctctatattcgaataccatggattgaggaagcacatatgttgacgcacccgcgtctgtttttgtttctactccataatactcccacaaatactgacacaaacaagcatcatgaatacagtatctagccatatctaaagctatgtttagattataatccttatacatctgagctaaatcaacgtcatcctttccgaaagataatttatatgtatcattaggtaaagtaggacataatagtacgactttaaatccattttcccaaatatctttacgaattactttacatataatatcctcatcaacagtcacataattacctgtggttaaaacctttgcaaatgcagcggctttgcctttcgcgtccgtagtatcgtcaccgatgaacgtcatttctctaactcctctatttaatactttacccatgcaactgaacgcgttcttggatatagaatccaatttgtacgaatccaatttttcagatttttgaatgaatgaatatagatcgaaaaatatagttccattattgttattaacgtgaaacgtagtattggccatgccgcctactcccttatgactagactgatttctctcataaatacagagatgtacagcttcctttttgtccggagatctaaagataatcttctctcctgttaataactctagacgattagtaatatatctcagatcaaagttatgtccgttaaaggtaacgacgtagtcgaacgttagttccaacaattgtttagctattcgtaacaaaactatttcagaacatagaactagttctcgttcgtaatccatttccattagtgactgtatcctcaaacatcctctatcgacggcttcttgtatttcctgttccgttaacatctcttcattaatgagcgtaaacaataatcgtttaccacttaaatcgatataacagtaacttgtatgcgagattgggttaataaatacagaaggaaacttcttatcgaagtgacactctatatctagaaataagtacgatcttgggatatcgaatctaggtatttttttagcgaaacagttacgtggatcgtcacaatgataacatccattgttaatctttgtcaaatattgctcgtccaacgagtaacatccgtctggagatatcccgttagaaatataaaaccaactaatattgagaaattcatccatggtggcattttgtatgctgcgtttctttggctcttctatcaaccacatatctgcgacggagcattttctatctttaatatctagattataacttattgtctcgtcaatgtctatagttctcatctttcccaacggcctcgcattaaatggaggaggagacaatgactgatatatttcgtccgtcactacgtaataaaagtaatgaggaaatcgtataaatacggtctcaccatttcgacatctggatttcagatataaaaatctgttttcaccgtgactttcaaaccaattaatgcaccgaacatccatttatagaatttagaaatatattttcatttaaatgaatcccaaacattggggaagagccgtatggaccattatttttatagtactttcgcaagcgggtttagacggcaacatagaagcgtgtaaacgaaaactatatactatagtcagcactcttccatgtcctgcatgtagacggcacgcgactatcgctatagaggacaataatgtcatgtctagcgatgatctgaattatatttattattttttcatcagattatttaacaatttggcatctgatcccaaatacgcgatcgatgtgacaaaggttaaccctttataaacttaacccattataaaacttatgattagtcacaactgaaataaccgcgtgattattttttggtataattctacacggcatggtttctgtaactatgaattcaacccccgttacattagtgaaatctttaacaaacagcaagggttcgtcaaagacataaaactcattgtttacaatcgaaatagaccccctatcacacttaaaataaaaaatatccttatcctttaccaccaaataaaattctgattggtcaatgtgaatgtattcacttaacagttccacaaatttatttattaactccgaggcacatacatcgtcggtattttttatggcaaactttactcttccagcatccgtttctaaaaaaatattaacgagttccatttatatcatccaatattattgaaatgacgttgatggacagatgatacaaataagaaggtacggtacctttgtccaccatctcctccaattcatgctctattttgtcattaactttaatgtatgaaaacagtacgccacatgcttccatgacagtgtgtaacactttggatacaaaatgtttgacattagtataattgttcaagactgtcaatctataatagatagtagctataatatattctatgatggtattgaagaagatgacaaccttggcatattgatcatttaacacagacatggtatcaacagatagcttgaatgaaagagaatcagtaattggaataagcgtcttctcgatagagtgtccgtataccaacatgtctgatattttgatgtattccattaaattatttagttttttctttttattttcgttaaacagcatttctgtcaacggaccccaacatcgttgaccgattaagttttgattgatttttccgtgtaatgcgtatctagtcagatcgtatagcctatccaataatccatcatctgtgcgtagatcacatcgtacactttttaattctctatagaagagcgacagacatctggagcaattacagacagcaatttctttattctctacagatgtaagatacttgaagacattcctatgatgatgcagaattttggataacacggtattgatggtatctgttaccataattcctttgatggctgatagtgtcagagcacaagatttccaatctttgacaatttttagcaccattatctttgttttgatatctatatcagacagcatggtgcgtctgacaacacagggattaagacggaaagatgaaatgattctctcaacatcttcaatggataccttgctattttttctggcattatctatatgtgcgagaatatcctctagagaatcagtatcctttttgatgatagtggatctcaatgacatgggacgtctaaaccttcttattttatcaccagattgcatggtgatttgtcttctttcttttatcataatgtaatctctaaattcatcggcaaattgtctatatctaaaatcataatatgagatgtttacctctacaaatatctgttcgtccaatgttagagtatctacatcagttttgtattccaaattaaacatggcaacggatttaattttatattcctctattaagtcctcgtcgataataacagaatgtagataatcatttaatccatcgtacatggttggaagatgcttgttgacaaaatctttaattgtcttgatgaaggtgggactatatctaacatcttgattaataaaatttataacattgtccataggatactttgtaactagttttatacacatctcttcatcggtaagtttagacagaatatcgtgaacaggtggtatattatattcatcagatatacgaagaacaatgtccaaatctatattgtttaatatattatatagatgtagcgtagctcctacaggaatatctttaactaagtcaatgatttcatcaaccgttagatctattttaaagttaatcatataggcattgatttttaaaaggtatgtagccttgactacattctcattaattaaccattccaagtcactgtgtgtaagaagattatattctatcataagcttgactacatttggtcccgataccattaaagaattcttatgatataaggaaacagcttttaggtactcatctactctacaagaattttggagagccttaacgatatcagtgacgtttattatttcaggaggaaaaaacctaacattgagaatgtcggagttaatagcttccagatacagtgattttggcaatagtccgtgtaatccataatccagtaacacgagctggtgcttgctagacaccttttcaatgtttaatttttttgaaataagctttgataaagccttcctcgcaaattccggatacatgaacatgtcggcgacatgattaagtattgttttttcattatttttatattttctcaacaagttctcaataccccaatagatgatagaatatcacccaatgcgtccatgttgtctatttccaacaggtcgctatatccaccaatagaagtttttccaaaaaagattctaggaacagttctaccaccagtaatttgttcaaaatagtcacgcaattcattttcgggtttaaattctttaatatcgacaatttcatacgctcctcttttgaaactaaacttatttagaatatccagtgcatttctacaaaaaggacatgtatacttgacaaaaattgtcactttgttattggccaacctttgttgtacaaattcctcggccattttaatatttaagtgatataaaactatctcgacttatttaactctttagtcgagatatatggacgcagatagctatatgatagccaactacagaaggcaaacgctataaaaaacataattacgacgagcatatttataaatatttttattcagcattacttgatatagtaatattaggcacagtcaaacattcaaccactctcgatacattaactctctcattttctttaacaaattctgcaatatcttcgtaaaaagattcttgaaactttttagaatatctatcgactctagatgaaatagcgttcgtcaacatactatgttttgtatacataaaggcgcccattttaacagtttctagtgacaaaatgctagcgatcctaggatcctttagaatcacatagattgacgattcgtctctcttagtaactctagtaaaataatcatacaatctagtacgcgaaataatattatccttgacttgaggagatctaaacaatctagttttgagaacatcgataagttcatcgggaatgacatacatactatctttaatagaactcttttcatccagttgaatggattcgtccttaaccaactgattaatgagatcttctattttatcattttccagatgatatgtatgtccattaaagttaaattgtgtagcgcttctttttagtctagcagccaatactttaacatcactaatatcgatatacaaaggagatgatttatctatggtattaagaattcgtttttcgacatctgtcaaaaccaattcctttttgcctgtatcatccagttttccatcctttgtaaagaaattattttctactagactattaataagactgataaggattcctccataattgcacaatccaaactttttaacaaaactagactttacaagatctacaggaatgcgtacttcaggtttcttagcttgtgattttttcttttgtggacattttcttgtgaccaactcatctaccatttcattgattttagcagtgaaataagctttcaatgcacgggcactgatactattgaaaacgagttgatcttcaaattccgccatttaagttcaccaaacaacttttaaatacaaatatatcaatagtagtagaataagaactataaaaaaaataataattaaccaataccaaccccaacaaccggtattattagttgatgtgactgttttctcatcacttagaacagatttaacaatttctataaagtctgtcaaatcatcttccggagaccccataaatacaccaaatatagcggcgtacaacttatccatttatacattgaatattggcttttctttatcgctatcttcatcatattcatcatcaatatcaacaagtcccagattacgagccagatcttcttctacattttcagtcattgatacacgttcactatctccagagagtccgataacgttagccaccacttctctatcaatgattagtttcttgagtgcgaatgtaatttttgtttccgttccggatctatagaaaactacaggtgtgataattgccttggccaattgtctttctcttttactgagtgattctagttcaccttctatagatctgagaatggatgattctccagtcgaaacatattctaccatggatccgtttaatttgttgatgaagatggattcatccttaaatgttttctctgtaatagtttccaccgaaagactatgcaaagaatttggaatgcgttccttgtgcttaatgtttccatagacggcttctagaagttgatacaacataggactagccgcggtaacttttatttttagaaagtatccatcgcttctatcttgtttagatttatttttataaagtttagtctctccttccaacataataaaagtggaagtcatttgactagataaactatcagtaagttttatagagatagacgaacaattagcgtattgagaagcatttagtgtaacgtattcgatacattttgcattagatttactaatcgattttgcatactctataacacccgcacaagtctgtagagaatcgctagatgcagtaggtcttggtgaagtttcaactctcttcttgattaccttactcatgattaaacctaaataattgtactttgtaatataatgatatatattttcactttatctcatttgagaataaaaatgtttttgtttaaccactgcatgatgtacagatttcggaatcgcaaaccaccagtggttttattttatccttgtccaatgtgaattgaatgggagcggatgcgggtttcgtacgtagatagtacattcccgtttttagaccgagactccatccgtaaaaatgcatactcgttagtttggaataactcggatctgctatatggatattcatagattgactttgatcgatgaaggctcccctgtctgcagccatttttatgatcgtcttttgtggaatttcccaaatagttttataaactcgcttaatatcttctggaaggtttgtattctgaatggatccaccatctgccataatcctattcttgatctcatcattccataattttctctcggttaaaactctaaggagatgcggattaactacttgaaattctccagacaatactctccgagtgtaaatattactggtatacggttccaccgactcattatttcccaaaatttgagcagttgatgcagtcggcataggtgccaccaataaactatttctaagaccgtatgttctgattttatcttttagaggttcccaattccaaagatccgacggtacaacattccaaagatcatattgtagaataccgttactggcgtacgatcctacatatgtatcgtatggtccttccttctcagctagttcacaactcgcctctaatgcaccgtaataaatggtttcgaagatcttcttatttagatcttgtgcttccaggctatcaaatggataatttaagagaataaacgcgtccgctaatccttgaacaccaataccgataggtctatgtctcttattagagatttcagcttctggaataggataataattaatatctataattttattgagatttctgacaattactttgaccacatccttcagtttgagaaaatcaaatcgcccatctattacaaacatgttcaaggcaacagatgccagattacaaacggctacctcattagcatccgcatattgtattatctcagtgcaaagattactacacttgatagttcctaaattttgttgattactctttttgttacacgcatccttataaagaatgaatggagtaccagtttcaatctgagattctataatcgctttccagacgactcgagcctttattatagatttgtatctcctttctctttcgtatagtgtatacaatcgttcgaactcgtctccccaaacattgtccaatccaggacattcatccggacacatcaacgaccactctccgtcatccttcactcgtttcataaagagatcaggaatccaaagagctataaatagatctctggttctatgttcctcgtttcctgtattctttttaagatcgaggaacgccataatatcagaatgccacggttccaagtatatggccataactccaggccgtttgtttcctccctgatctatgtatctagcggtgttattataaactctcaacattggaataataccgtttgatataccattggtaccggagatatagcttccactggcacgaatattactaattgatagacctattccccctgccattttagagattaatgcgcatcgttttaacgtgtcatagataccctctatgctatcatcgatcatgttaagtagaaaacagctagacatttggtgacgactagttcccgcattaaataaggtaggagaagcgtgcgtaaaccatttttcagaaagtagattgtacgtctcaatagctgagtctatatcccattgatgaattcctactgcgacacgcattaacatgtgctgaggtctttcaacgatcttgttgtttattttcaacaagtaggatttttccaaagttttaaaaccaaaatagttgtatgaaaagtctcgttcgtaaataataaccgagttgagtttatccttatatttgttaactatatccatggtgatacttgaaataatcggagaatgtttcccatttttaggattaacatagttgaataaatcctccatcacttcactaaatagtttttttgtttccttgtgtagatttgatacggctattctggcggctagaatggcataatccggatgttgtgtagtacaagtggctgctatttcggctgccagagtgtccaattctaccgttgttactccattatatattccttgaataaccttcatagctattttaataggatctatatgatccgtgtttaagccataacataattttctaatacgagacgtgattttatcaaacatgacattttccttgtatccatttcgtttaatgacaaacatttttgttggtgtaataaaaaaattatttaacttttcattaatagggatttgacgtatgtagcgtacaaaattatcgttcctggtatatagataaagagtcctatatatttgaaaatcgttacggctcgattaaactttaatgattgcatagtgaatatatcattaggatttaactccttgactatcagggcggcaccagaaattaccatcaaaagcattaatacagttatgccgatcgcagttagaacggttatagcatccaccatttatatctaaaaattagatcaaagaatatgtgacaaagtcctagttgtatactgagaattgacgaaacaatgtttcttacatatttttttcttattagtaactgacttaatagtaggaactggaaagctagacttgattattctataagtatagatacccttccaaataatattctctttgataaaagttccagaaaatgtagaattttttaaaaagttatcttttgctattaccaagattgtgtttagacgcttattattaatatgagtgatgaaatccacaccgcctctagatatcgcttttatttccacattagatggtaaatccaatagtgaaactatctttttaggaatgtatggactcgcgtttagaggagtgaacgtcttaggcgtcggaaaggatgattcatcaaacgaataaacaatttcacaaatggatgttaatgtattagtaggaaattttttgacgctagtggaattgaagattctaatggatgatgttctacctatttcatccgataacatgttaatttccgacaccaacggttttaatatttcgatgatatacggtagtctctctttcggacttatatagcttattccacaatacgagtcattatatactccaaaaaacaaaataactagtataaaatctgtatcgaatgggaaaaacgaaattatcgacataggtatagaatctggaacattgaacgtattaatacttaattctttttctgtggtaagtaccgataggttattgacattgtatggttttaaatattctataacttgagacttgatagatattagtgatgaattgaaaattatttttatcaccacgtgtgtttcaggatcatcgtcgacgcccgtcaaccaaccgaatggagtaaaataaatatcattaatatatgctctagatattagtatttttatcaatcctttgattatcatcttctcgtaggcgaatgattccatgatcaagagtgatttaagaacatcctccggagtattaatgggcttagtaaacagtccatcgttgcaataataaaagttatccaagttaaaggatattatgcattcgtttaaagatatcacctcatctgacggagacaattttttggtaggttttagagactttgaagctacttgtttaacaaagttattcatcgtcgtttactattctatttaattttgtagttaatttatcacatatcacattaattgactttttggtccatttttccatacgtttatattcttttaatcctgcgttatccgtttccgttatatccagggatagatcttgcaagttaaatagaatgctcttaaataatgtcatttttttatccgctaaaaatttaaagaatgtataaacttttttcaaagatttaaaacttttaggtggagttctagtacacaatatcataaacaaactaataaacatcccgcattcagattccaacagctgattaacttccacattaatacagcctattttcgctccaaatgtacattcgaaaaatctgaataaaacatcgatgtcacaatttgtattatccaatacagaatgtctgtgattcgtgttaaaaccatcggagaaggaatagaaataaaaattattatagtggtggaattcagttggaatattgcctccggagtcataaaaggatactaaacattgttttttatcataaattacacatttccaatgagacaaataacaaaatccaaacattacaaatctagaggtagaacttttaattttgtctttaagtatatacgataagatatgtttattcataaacgcgtcaaatttttcatgaatcgctaaggagtttaagaatctcatgtcaaattgtcctatataatccacttcggatccataagcaaactgagagactaagttcttaatacttcgattgctcatccaggctcctctctcaggctctattttcatcttgacgacctttggattttcaccagtatgtattcctttacgtgataaatcatcgattttcaaatccatttgtgagaagtctatcgccttagatactttttcccgtagtcgaggtttaaagaaatacgctaacggtatactagtaggtaactcaaagacatcatatatagaatggtaacgcgtctttaactcgtcggttaactctttcttttgatcgagttcgtcgctactattgggtctgctcaggtgccccgactctactagttccaacatcataccgataggaatacaagacactttgccagcggttgtagatttatcatatttctccactacatatccgttacaatttgttaaaaatttagatacatctatattgctacataatccagctagtgaatatatatgacataataaattggtaaatcctagttctggtattttactaattactaaatctgtatatctttccatttatcatggaaaagaatttaccagatatcttcttttttccaaactgcgttaatgtattctcttacaaatattcacaagatgaattcagtaatatgagtaaaacggaacgtgatagtttctcattggcggtgtttccagttataaaacatagatggcataacgcacacgttgtaaaacataaaggaatatacaaagttagtacagaagcacgtggaaaaaaagtatctcctccatcactaggaaaacccgcacacataaacctaaccgcgaagcaatatatatacagtgaacacacaataagctttgaatgttatagttttctaaaatgtataacaaatacagaaatcaattcgttcgatgagtatatattaagaggactattagaagctggtaatagtttacagatattttccaattccgtaggtaaacgaacagatactataggtgtactagggaataagtatccatttagcaaaattccattggcctcattaactcctaaagcacaacgagagatattttcagcgtggatttctcatagacctgtagttttaactggaggaactggagtgggtaagacgtcacaggtacccaagttattgctttggtttaattatttatttggtggattctctactctagataaaatcactgactttcacgaaagaccagtcattctatctcttcctaggatagctttagttagattgcatagcaataccattttaaaatcattgggatttaaggtactagatggatctcctatttctttacggtacggatctataccggaagaattaataaacaaacaaccaaaaaaatatggaattgtattttctacccataagttatctctaacaaaactatttagttatggcactcttattatagacgaagttcatgagcatgatcaaataggagatattattatagcagtagcgagaaagcatcatacgaaaatagattctatgtttttaatgactgccacgttagaggatgacagggaacggctaaaagtatttttacctaatcccgcatttatacatattcctggagatacactgtttaaaattagcgaggtatttattcataataagataaatccatcttccagaatggcatacatagaagaagaaaagagaaatttagttactgctatacagatgtatactcctcctgatggatcatccggtatagtctttgtggcatccgttgcacagtgtcacgaatataaatcatatttagaaaaaagattaccgtatgatatgtatattattcatggtaaggtcttagatatagacgaaatattagaaaaagtgtattcatcacctaatgtatcgataattatttctactccttatttggaatccagcgttactatacacaatgttacacacatttatgatatgggtagagtttttgtccccgctccttttggaggatcgcaacaatttatttctaaatctatgagagatcaacgaaaaggaagagtaggaagagttaatcctggtacatacgtctatttctatgatctgtcttatatgaagtctatacagcgaatagattcagaatttctacataattatatattgtacgctaataagtttaatctaacactccccgaagatttgtttataatccctacaaatttggatattctatggcgtacaaaggaatatatagactcgttcgatattagtacagaaacatggaataaattattatccaattattatatgaagatgatagagtatgctaaactttatgtactaagtcctattctcgctgaggagttggataactttgagaggacgggagaattaactagtattgtacgagaagccattttatctctaaatttacgaattaagattttaaattttaaacataaagatgatgatacgtatatacacttttgtaaaatattattcggtgtctataacggaacaaacgctactatatattatcatagacctctaacgggatatatgaatatgatttcagatactatatttgttcctgtagataataactaaaaatcaaactctaatgaccacatctttttttagagatgaaaaattttctacatctccttttgtagacacgactaaacattttgcagaaaaaagtttattagtgtttagataatcgtatacttcatcagtgtagatagtaaatgtgaacagataaaaggtattcttgctcaatagattggtaaattccatagaatatattaatcctttcttcttgagatcccacatcatttcaaccagagacgttttatccaatgatttacctcgtactataccacatacaaaactagattttgcagtgacgtcgtacctggtattcctaccaaacaaaattttacttttagttcttttagaaaattctaaggtagaatctctatttgccaatatgtcatctatggaattaccactagcaaaaaatgatagaaatatatattgatacatcgcagctggttttgatctactatactttaaaaacgaatcagattccataattgcctgtatatcatcagctgaaaaactatgttttacacgtattccttcggcatttctttttaatgatatatcttgtttagacaatgataaagttatcatgtccatgagagacgcgtctccgtatcgtataaatatttcattagatgttagacgcttcattaggggtatacttctataaggtttcttaatcagtccatcattggttgcgtcaagaactactatcggatgttgttgggtatctctagtgttacacatggccttactaaagtttgggtaaataactatgatatctctattaattatagatgcatatatttcattcgtcaaggatattagtatcgacttgctatcgtcattaatacgtgtaatgtaatcatataaatcatgcgatagccaaggaaaatttaaatagatgttcatcatataatcgtcgctataattcatattaatacgttgacattgactaatttgtaatatagcctcgccacgaagaaagctctcgtattcagtttcatcgataaaggataccgttaaatataactggttgccgatagtctcatagtctattaagtggtaagtttcgtacaaatacagaatccctaaaatattatctaatgttggattaatctttaccataactgtataaaatggagacggagtcataactattttaccgtttgtacttactggaatagatgaaggaataatctccggacatgctggtaaagacccaaatgtctgtttgaagaaatccaatgttccaggtcctaatctcttaacaaaaattacgatattcgatcccgatatcctttgcattctatttaccagcatatcacgaactatattaagattatctatcatgtctattctcccaccgttatataaatcgcctccgctaagaaacgttagtatatccatacaatggaatacttcatttctaaaatagtattcgttttctaattctttaatgtgaaatcgtatactagaaagggaaaaattatctttgagttttccgttagaaaagaaccacgaaactaatgttctgattgcgtccgattccgttgctgaattaatggatttacaccaaaaactcatataacttctagatgtagaagcattcgctaaaaaattagtagaatcaaaggatataagtagatgttccaacaagtgagcaattcccaagatttcatctatatcattctcgaatccgaaattagaaattcccaagtagatatcctttttcatccgatcgttgatgaaaatacgaactttattcggtaagacaatcatttactaaggagtaaaataggaagtaatgttcgtatgtcgttatcatcgtataaattaaaggtgtgttttttaccattaagtgacattataattttaccaatattggaattataatataggtgtatttgcgcactcgcgacggttgatgcatcggtaaatatagctgtatctaatgttctagtcggtatttcatcatttcgctgtctaataatagcgttttctctatctgtttccattacagctgcctgaagtttattggtcggataatatgtaaaataataagaaatacatacgaataacaaaaataaaataagatataataaagatgccatttagagatctaattttgttcaacttgtccaaattcctacttacagaagatgaggaatcgttggagatagtgtcttccttatgtagaggatttgaaatatcttatgatgacttgataacttactttccagataggaaataccataaatatatttataaagtatttgaacatgtagatttatcggaggaattaagtatggaattccatgatacaactttgcgagatttagtttatcttagattgtacaagtattccaagtgtatacggccgtgttataaattaggagataatctaaaaggcatagttgttataaaggacaggaatatttatattagggaagcaaatgatgacttgatagaatatctcctcaaggaatacactcctcagatttatacatattctaatgagcgcgtccccataactggttcaaaattaattctttgtggattttctcaagttacatttatggcgtatacaacgtcgcatataacaacaaataaaaaggtagatgttctcgtttccaaaaaatgtatagatgaactagtcgatccaataaattatcaaatacttcaaaatttatttgataaaggaagcggaacaataaacaaaatactcaggaagatattttattcggtaaccggtggccaaactccataggtagctttttctatttcggattttagaatttccaaattcaccagcgatttatcggttttggtgaaatccaaggatttattaatgtccacaaatgccatttgttttgtctgtggattgtatttgaaaatggaaacgatgtagttagatagatgcgctgcgaagtttcctattagggttccgcgcttcacgtcacccagcatacttgaatcaccatcctttaaaaaaaatgataagatatcaacatggagtatatcatactcggattttaattcttctactgcatcactgacattttcacaaatactacaatacggtttaccgaaaataatcagtacgttcttcatttatgggtatcaaaaacttaaaatcgttactgctggaaaataaatcactgacgatattagatgataatttatacaaagtatacaatggaatatttgtggatacaatgagtatttatatagccgtcgccaattgtgtcagaaacttagaagagttaactacggtattcataaaatacgtaaacggatgggtaaaaaagggagggcatgtaaccctttttatcgatagaggaagtataaaaattaaacaagacgttagagacaagagacgtaaatattctaaattaaccaaggacagaaaaatgctagaattagaaaagtgtacatccgaaatacaaaatgttaccggatttatggaagaagaaataaaggcaaaaatgcaattaaaaatcgataaacttacatttcaaatatatttatctgattctgataacataaaaatatcattgaatgagatactaacacatttcaacaataatgagaatgttacattattttattgtgatgaacgagacgcagaattcgttatgtgtctcgaggctaaaacacatttctctaccacaggagaatggccgttgataataagtaccgatcaggatactatgctatttgcatctactgataatcatcctaagatgataaaaaacttaactcaactgtttaaatttgttccctcggcagaggataactatttagcaaaattaacggcgttagtgaatggatgtgatttctttcctggactctatggggcatctataacacccaccaacttaaacaaaatacaattgtttagtgattttacaatcgataatatagtcactagtttggcaattaaaaattattatagaaagactaactctaccgtagacgtgcgtaatattgttacgtttataaacgattacgctaatttagacgatgtctactcgtatgttcctccttgtcaatgcactgttcaagaatttatattttccgcattagatgaaaaatggaatgaatttaaatcatcttatttagagaccgttccgttaccctgtcaattaatgtacgcgttagaaccacgtaaggagattgatgtttcagaagttaaaactttatcatcttatatagatttcgaaaatactaaatcagatatcgatgttataaaatctatatcctcgatttttggatattctaacgaaaactgtaacacgatagtattcggcatctataaggataatttactactgagtataaataattcattttactttaacgatagtctgttaataaccaatactaaaagtgataatataataaatataggttactagattaaaaatggtgttccaactcgtgtgctctacatgcggtaaagatatttctcacgaacgatataaattgattatacgaaaaaaatcattaaaggatgtactcgtcagtgtaaagaacgaatgttgtaggttaaaattatctacacaaatagaacctcaacgtaacttaacagtgcaacctctattggatataaactaatatggatccggttaattttatcaagacatatgcgcctagaggttctattatttttattaattataccatgtcattaacaagtcatttgaatccatcgatagaaaaacatgtgggtatttattatggtacgttattatcggaacacttggtagttgaatctacctatagaaaaggagttcgaatagtcccattggatagtttttttgaaggatatcttagtgcaaaagtatacatgttagagaatattcaagttatgaaaatagcagctgatacgtcattaactttattgggtattccgtatggatttggtcatgatagaatgtattgttttaaattggtagctgactgttataaaaatgccggtgttgaaacatcgtctaaacgaatattaggtaaagatatttttctgagccaaaacttcacagacgataatagatggataaagatatatgattctaataatttaacattttggcaaattgattaccttaaagggtgagttaatatgcataactactcctccgttgttttttccctcgttctttttcttaacgttgtttgccatcactctcataatgtaaagatattctaaaatggtaaacttttgcatatcggacgcagaaattggtataaatgttgtaattgtattatttcccgtcaatggactagtcacagctccatcagttttatatcctttagagtatttctcactcgtgtctaacattctagagcattccatgatctgtttatcgttgatattggccggaaagatagattttttattttttattatattactattggcaattgtagatataacttctggtaaatatttttctaccttttcaatctcttctattttcaagccggctatatattctgctatattgttgctagtatcaataccttttcttgctaagaagtcatatgtggtattcactatatcagttttaactggtagttccattagcctttccacttctgcagaataatcagaaattggttctttaccagaaaatccagctactataataggctcaccgatgatcattggcaaaatcctatattgtaccagattaatgagagcatatttcatttccaataattctgctagttcttgagacattgatttatttgatgaatctagttggttctctagatactctaccatttctgccgcatacaataacttgttagataaaatcagggttatcaaagtgtttagcgtggctagaatagtgggcttgcatgtattaaagaatgcggtagtatgagtaaaccgttttaacgaattatatagtctccagaaatctgtggcgttacatacatgagccgaatgacatcgaagattgtccaatatttttaatagctgctctttgtccattatttctatatttgactcgcaacaattgtagataccattaatcactgattcctttttcgatgccggacaatagcacaattgtttagctttggactctatgtattcagaattaatagatatatctcttaatacagattgcactatacattttgaaactatgtcaaaaattgtagaacgacgctgttctgcagccatttaactttaaataatttacaaaaatttaaaatgagcatccgtataaaaatcgataaactgcgccaaattgtggcatatttttcagagttcagtgaagaagtgtctataaatgtagactcgacggatgagttaatgtatatttttgccgccttgggcggatctgtaaacatttgggccattatacctctcagtgcatcagtgttctaccgcggagccgaaaatattgtgtttaatcttccggtgtccaaggtaaaatcgtgtttgtgtagttttcacaatgatgccatcatagatatagaacctgatctggaaaataatctagtaaaactttctagttatcatgtagtaagtgtcgattgtaacaaggaactgatgcctattaggacagatactactatttgtctaagtatagatcaaaagaaatcttacgtgtttaattttcacaagtatgaagaaaaatgttgtggtagaaccgtcattcatttagaatggttgttgggctttatcaagtgtattagtcagcatcagcatttggctattatgtttaaagatgacaatattattatgaagactcctggtaatactgatgcgttttccagggaatattctatgactgaatgttctcaagaactacaaaagttttctttcaaaatagctatctcgtctctcaacaaactacgaggattcaaaaagagagtcaatgtttttgaaactagaatcgtaatggataatgacgataacattctaggaatgttgttttcggatagagttcaatcctttaagatcaacatctttatggcgtttttagattaatactttcaatgagataaatatgggtggcggagtaagtgttgagctccctaaacgggatccgcctccgggagtacccactgatgagatgttattaaacgtggataaaatgcatgacgtgatagctcccgctaagcttttagaatatgtgcatataggaccactagcaaaagataaagaggataaagtaaagaaaagatatccagagtttagattagtcaacacaggacccggtggtctttcggcattgttaagacaatcgtataatggaaccgcacccaattgctgtcgcacttttaatcgtactcattattggaagaaggatggaaagatatcagataagtatgaagagggtgcagtattagaatcgtgttggccagacgttcacgacactggaaaatgcgatgttgatttattcgactggtgtcagggggatacgttcgatagaaacatatgccatcagtggatcggttcagcctttaataggagtgatagaactgtagagggtcaacaatcgttaataaatctgtataataagatgcaaacattatgtagtaaagatgctagtgtaccaatatgtgaatcatttttgcatcatttacgcgcacacaatacagaagatagcaaagagatgatcgattatattctaagacaacagtctgcggactttaaacagaaatatatgagatgtagttatcccactagagataagttagaagagtcattaaaatatgcggaacctcgagaatgttgggatccagagtgttcgaatgccaatgttaatttcttactaacacgtaattataataatttaggactttgcaatattgtacgatgtaatactagcgtgaacaacttacagatggataaaacttcctcattaagattgtcatgtggattaagcaatagtgatagattttctactgttcccgtcaatagagcaaaagtagttcaacataatattaaacattcgttcgacctaaaattgcatttgatcagtttattatctctcttggtaatatggatactaattgtagctatttaaatgggtgccgcggcaagcatacagacgacggtgaatacactcagcgaacgtatctcgtctaaattagaacaagaagcgaacgctagtgctcaaacaaaatgtgatatagaaatcggaaatttttatatccgacaaaaccatggatgtaacctcactgttaaaaatatgtgctctgcggacgcggatgctcagttggatgctgtgttatcagccgctacagaaacatatagtggattaacaccggaacaaaaagcatacgtgccagctatgtttactgctgcgttaaacattcagacaagtgtaaacactgttgttagagattttgaaaattatgtgaaacagacttgtaattctagcgcggtcgtcgataacaaattaaagatacaaaacgtaatcatagatgaatgttacggagccccaggatctccaacaaatttggaatttattaatacaggatctagcaaaggaaattgtgccattaaagcgttgatgcaattgacgactaaggccactactcaaatagcacctagacaagttgctggtacaggagttcagttttatatgattgttatcggtgttataatattggcagcgttgtttatgtactatgccaagcgtatgctgttcacatccaccaatgataaaatcaaacttattttagccaataaggaaaacgtccattggactacttacatggacacattctttagaacttctccgatggttattgctaccacggatatacaaaactgaaaatatattgataatattttaatagattaacatggaagttatcgctgatcgtctagacgatatagtgaaacaaaatatagcggatgaaaaatttgtagattttgttatacacggtctagagcatcaatgtcctgctatacttcgaccattaattaggttgtttattgatatactattatttgttatagtaatttatatttttacggtacgtctagtaagtagaaattatcaaatgttgttggtggcgctagtcatcacattaactattttttattactttatactataatagtactagactgacttctaacaaacatctcacctgccataaataaatgcttgatattaaagtcttctatttctaacactattccatctgtggaaaataatactctgacattatcgctaattgacacatcggtgagtgatatgcctataaagtaataatcttctttgggcacatataccagtgtaccaggttctaacaacctatttactggtgctcctgtagcatactttttctttaccttgagaatatccatcgtttgcttggtcaatagcgatatgtgattttttatcaaccactcgaaaaagtaattggagtgttcatatcctctacgggctattgtctcatggccgtgtatgaaatttaagtaacacgactgtggtagatttgttctatagagccggttgccgcaaatagatagaactaccaatatgtctgtacaaatgttaaacattaattgattaacagaaaaaacaatgttcgttctgggaatagaaaccagatcaaaacaaaattcgttagaatatatgccacgtttatacattgaatataaaataactacagtttgaaaaataacagtatcatttaaacatttaacttgcggggttaatctcacaactttactgtttttaaactgttcaaaatatagcatcgatccatgagaaatacgtttagccgcctttaatagaggaaatcccaccgcctttctggatctcaccaacgacgatagttctgaccagcaactcatttcttcatcatccacctgttttaacatataataggcaggagatagatatccgtcattgcaatattccttctcgtaggcacacaatctaatattgataaaatctccattctcttctctgcatttattatcttgtttcggtggctgattaggctgtagtcttggtttaggctttggtatatcgttgttgaatctattttggtcattaaatctttcatttcttcctggtatatttttatcacctcgtttggttggatttttgtctatattatcgtttgtaacatcggtacgggtattcatttatcacaaaaaaaacttctctaaatgagtctactgctagaaaacctcatcgaagaagataccatattttttgcaggaagtatatctgagtatgatgatttacaaatggttattgccggcgcaaaatccaaatttccaagatctatgctttctatttttaatatagtacctagaacgatgtcaaaatatgagttggagttgattcataacgaaaatatcacaggagcaatgtttaccacaatgtataatataagaaacaatttgggtctaggagatgataaactaactattgaagccattgaaaactatttcttggatcctaacaatgaagttatgcctcttattattaataatacggatatgactgccgtcattcctaaaaaaagtggtaggagaaagaataagaacatggttattttccgtcaaggatcatcacctatcttgtgtattttcgaaactcgtaaaaagattaatatttataaagaaaatatggaatccgcatcgactgagtatacacctatcggagacaacaaggctttgatatctaaatatgcgggaattaatatcctaaatgtgtattctccttccacatccataagattgaatgccatttacggattcaccaataaaaataaactagagaaacttagtactaataaggaactagaatcgtatagttctagccctcttcaagaacccattaggttaaatgattttctgggactattggaatgtgttaaaaagaatattcctctaacagatattccgacaaaggattgattactataaatggagaatgttcctaatgtatactttaatcctgtgtttatagagcccacgtttaaacattctttattaagtgtttataaacacagattaatagttttatttgaagtattcgttgtattcattctaatatatgtattttttagatctgaattaaatatgttcttcatgcctaaacgaaaaatacccgatcctattgatagattacgacgtgctaatctagcgtgtgaagacgataaattaatgatctatggattaccatggatgacaactcaaacatctgcgttatcaataaatagtaaaccgatagtgtataaagattgtgcaaagcttttgcgatcaataaatggatcacaaccagtatctcttaacgatgttcttcgcagatgatgattcattttttaagtatttggctagtcaagatgatgaatcttcattatctgatatattgcaaatcactcaatatctagactttctgttattattattgatccaatcaaaaaataaattagaagccgtgggtcattgttatgaatctctttcagaggaatacagacaattgacaaaattcacagactttcaagattttaaaaaactgtttaacaaggtccctattgttacagatggaagggtcaaacttaataaaggatatttgttcgactttgtgattagtttgatgcgattcaaaaaagaatcctctctagctaccaccgcaatagatcctattagatacatagatcctcgtcgcgatatcgcattttctaacgtgatggatatattaaagtcgaataaagtgaacaataattaattctttattgtcatcatgaacggcggacatattcagttgataatcggccccatgttttcaggtaaaagtacagaattaattagacgagttggtaccaaaaattgaaaaactagcgtctttttttgctcgactgcagaccatgggaagctctaagagtaaaccgaaagatcccagtcagagaggcgttcaggttgaaacgatatcaccgggtgatggccgcacgtttccaaaacgagggcaaacgtgcgtcgttcattacactggaatgctggaagacggaaaaaaagtagattcctcacgcgacaggaataagccgttcaagtttatgcttgggaagcaggaagtgatcagagggtgggaagagggagtagcgcaaatgtcagtaggccagagagcaaagcttactatatcacccgattatgcctatggggcgacagggcatccggggataattccccctcacgcaactctcgttttcgacgtcgagttgttgaaacttgagggagtgcaggtcgaaacgatctcccccggggatggacggacttttcctaagcggggccagacctgcgtagtccattacacaggcatgctcgaggacgggaaaaaagttgactcctcaagagaccgcaacaagcctttcaaatttatgctgggaaaacaagaagtaatcaggggctgggaagaaggcgtcgcgcagatgagtgtaggtcagcgagccaaacttacgatttcaccggattatgcctacggggcgaccggccacccggggattattcccccgcatgcaaccctcgtttttgatgtcgaacttctcaagctggagagtgggtctggagggggctcaatggacccatttcttgtcctcctgcactctgtatcatccagcctgagtagcagcgagctgacagagttgaagtttctttgcctcggcagggtgggtaagagaaagctcgaacgcgtacagtccggcttggacctcttcagtatgttgcttgagcagaacgatctcgagccaggacataccgagcttctgagagagctgttggccagtcttaggcggcacgatcttctccgcagagtagatgattttgaagccggtgcggctgccggtgcagcgcccggtgaagaagacctgtgtgccgcctgattaattaatttttatgagctcggaggtaatgatatgtatcaatcggtgtgtagaaagtgttacatcgactcataatattatattttttatctaaaaaactaaaaataaacattgattaaattttaatataatacttaaaaatggatgttgtgtcgttagataaaccgtttatgtattttgaggaaattgataatgagttagattacgaaccagaaagtgcaaatgaggtcgcaaaaaaactaccgtatcaaggacagttaaaactattactaggagaattattttttcttagtaagttacagcgacacggtatattagatggtgccaccgtagtgtatataggatcggctcctggtacacatatacgttatttgagagatcatttctataatttaggagtgatcatcaaatggatgctaattgacggccgccatcatgatcctattttaaatggattgcgtgatgtgactctagtgactcggttcgttgatgaggaatatctacgatccatcaaaaaacaactgcatccttctaagattattttaatttctgatgtaagatccaaacgaggaggaaatgaacctagtacggcggatttactaagtaattacgctctacaaaatgtcatgattagtattttaaaccccgtggcatctagtcttaaatggagatgcccgtttccagatcaatggatcaaggacttttatatcccacacggtaataaaatgttacaaccttttgctccttcatattcagctgaaatgagattattaagtatttataccggtgagaacatgagactgactcgagttaccaaattagacgctgtaaattatgaaaaaaagatgtactaccttaataagatcgtccgtaacaaagtagttgttaactttgattatcctaatcaggaatatgactattttcacatgtactttatgctgaggaccgtgtactgcaataaaacatttcctactactaaagcaaaggtactatttctacaacaatctatatttcgtttcttaaatattccaacaacatcaactgaaaaagttagtcatgaaccaatacaacgtaaaatatctagcaaaaattctatgtctaaaaacagaaatagcaagagatccgtacgcggtaataaatagaaacgtgctactgagatatactaccgatatagagtataatgatttagttactttaataaccgttagacataaaattgattctatgaaaactgtgtttcaggtatttaacgaatcatccataaattatactccggttgatgatgattatggagaaccaatcattataacatcgtatcttcaaaaaggtcataacaagtttcctgtaaattttctatacatagatgtggtaatatctgacttatttcctagctttgttagactagatactacagaaactaatatagttaatagtgtactacaaacaggcgatggtaaaaagactcttcgtcttcccaaaatgttagagacggaaatagttgtcaagattctctatcgccctaatataccattaaaaattgttagatttttccgcaataacatggtaactggagtagagatagccgatagatctgttatttcagtcgctgattaatcaattagtagagatgagataagaacattataataatcaataatattatcttatatctcgtttagaaaaatgctaatattaaaatagctaacgctagtaatccaatcggaagccatttgatatctataatagggtatctaatttcctgattcagatagcggacagctatattctcggtagctactcgtttggaatcacaaacattatttacatctaatttactatctgtaatggaaacgtttcccaatgaaatggtacaatccgatacattgcattttgttatatttttttttaaagaggctggtaacaacgcatcgcttcgtttacatggctcgtaccaacaataatagggtaatcttgtatctattcctatccgtactatgcttttatcaggataaatacatttacatcgtatatcgtctttgttagcatcacagaatgcataaatttgttcgtccgtcatgataaaaatttaaagtgtaaatataactattatttttatagttgtaataaaaagggaaatttgattgtatactttcggttctttaaaagaaactgacttgataaaaatggctgtaatctctaaggttacgtatagtctatatgatcaaaaagagattaatgctacagatattatcattagtcatgttaaaaatgacgacgatatcggtaccgttaaagatggtagactaggtgctatggatggggcattatgtaaaacttgtgggaaaacggaattggaatgtttcggtcactggggtaaagtaagtatttataaaactcatatagttaagcctgaatttatttcagaaattattcgtttactgaatcatatatgtattcactgcggattattgcgttcacgagaaccgtattccgacgatattaacctaaaagagttatcgggacacgctcttaggagattaaaggataaaatattatccaagaaaaagtcatgttggaacagcgaatgtatgcaaccgtatcaaaaaattactttttcaaagaaaaaggtttgtttcgtcaacaagttggatgatattaacgttcctaattctctcatctatcaaaagttaatttctattcatgaaaagttttggccattattagaaattcatcaatatccagctaacttattttatacagactactttcccatccctccgctgattattagaccggctattagtttttggatagatagtatacccaaagagaccaatgaattaacttacttattaggtatgatcgttaagaattgtaacttgaatgctgatgaacaggttatccagaaggcggtaatagaatacgatgatattaaaattatttctaataacactaccagtatcaatttatcatatattacatccggcaaaaataatatgattagaagttatatcgtcgcccgacgaaaagatcagaccgctagatctgtaattggtcccagtacatctatcaccgttaatgaggtaggaatgcccgcatatattagaaatacacttacagaaaagatatttgttaatgcctttacagtggataaagttaaacaactattagcgtcaaaccaagttaaattttactttaataaacgattaaaccaattaacaagaatacgccaaggaaagtttatcaaaaataaaatacatttattgcctggtgattgggtagaagtagctgttcaagaatatacaagtattatttttggaagacagccgtctctacatagatacaacgtcatcgcttcatctatcagagctaccgaaggagatactatcaaaatatctcccggaattgccaactctcaaaatgctgatttcgacggagatgaagaatggatgatattggagcaaaatcctaaagccgtaattgaacaaagtattcttatgtatccgacgacgttactcaaacacgatattcatggagcccccgtttatggatctattcaagatgaaatcgtagcagcgtattcattgtttaggatacaagatctttgtttagatgaagtattgaacatcttggggaaatatggaagagagttcgatcctaaaggtaaatgtaaattcagcggtaaagatatctatacttacttgataggtgaaaagattaattatccgggtctcttaaaggatggtgaaattattgcaaacgacgtagatagtaattttgttgtggctatgaggcatctgtcattggctggactcttatccgatcataagtcgaacgtggaaggtatcaactttattatcaagtcatcttatgtttttaagagatatctatctatttacggttttggggtgacattcaaagatctgagaccaaattcgacgttcactaataaattggaggccatcaacgtagaaaaaatagaacttatcaaagaagcatacgccaaatatctcaacgatgtaagagacgggaaaatagttccattatctaaagctttagaggcggactatgtggaatccatgttatccaacttgacaaatcttaatatccgagagatagaagaacatatgagacaaacgctgatagatgatccagataataacctcctgaaaatggccaaagcgggttataaagtaaatcctacagaactaatgtatattctaggtacgtatggacaacaaaggattgatggtgaaccagcagagactcgagtattgggtagagtcttaccttactatcttccagactctaaggatccagaaggaagaggttacattcttaattctttaacaaaaggattaacgggttctcaatattacttttcgatgctggttgccagatctcaatctactgatatcgtctgtgaaacatcacgtaccggaacactggctagaaaaatcattaaaaagatggaggatatggtggtcgacggatacggacaagtagttataggtaatacgctcatcaagtacgccgccaattataccaaaattctaggctcagtatgtaaacctgtagatcttatctatccagatgagtccatgacttggtatttggaaattagtgctctgtggaataaaataaaacagggattcgtttactctcagaaacagaaacttgcaaagaagacattggcgccgtttaatttcctagtattcgtcaaacccaccactgaggataatgctattaaggttaaggatctgtacgatatgattcataacgtcattgatgatgtgagagagaaatacttctttacggtatctaatatagattttatggagtatatattcttgacgcatcttaatccttctagaattagaattacaaaagaaacggctatcactatctttgaaaagttctatgaaaaactcaattatactctaggtggtggaactcctattggaattatttctgcacaggtattgtctgagaagtttacacaacaagccctgtccagttttcacactactgaaaaaagtggtgccgtcaaacaaaaacttggtttcaacgagtttaataacttgactaatttgagtaagaataagaccgaaattatcactctggtatccgatgatatctctaaacttcaatctgttaagattaatttcgaatttgtatgtttgggagaattaaatccagacatcactcttcgaaaagaaacagataaatatgtagtagatataatagttaatagattatacatcaagagagcagaaataaccgaattagttgtcgaatatatgattgaacgatttatctcctttagcgtcattgtaaaggaatggggtatggagacattcattgaggacgaggataatattagatttactgtctacctaaatttcgttgaaccggaagaattgaatcttagtaagtttatgatggttcttccgggtgccgccaacaagggcaagattagtaaattcaagattcctatctctgattatacgggttatgacgacttcaatcaaacaaaaaagctcaataagatgactgtagaactcatgaatctaaaagaattgggttctttcgatttggaaaacgtcaacgtgtatcctggagtatggaatacatacgatatcttcggtatcgaggccgctcgtgaatacttgtgcgaagccatgttaaacacctatggagaagggttcgattatctgtatcagccttgtgatcttctcgctagtttactatgtgctagttacgaaccagaatcagttaataaattcaagttcggtgcagctagtactcttaagagagctacgttcggagacaataaagcattgttaaacgcggctcttcataaaaagtcagaacctattaacgataatagtagctgccacttttttagcaaggtccctaatataggaactggatattacaaatactttatcgacttgggtcttctcatgagaatggaaaggaaactatctgataagatatcttctcaaaagatcaaggaaatggaagaaacagaagacttttaattcttatcaataacatatttttctatgatctgtcttttaaacgatggattttccacaaatgcgcctctcaagtccctcatagaatgatacacgtataaaaaatatagcataggcaatgactccttatttttagacattagatatgccaaaatcatagccccgcttctatttactcccgcagcacaatgaaccaacacgggctcgtttcgttgatcacatttagataaaaaggcggttacgtcgtcaaaatatttactaatatcggtagttgtatcatctaccaacggtatatgaataatattaatattagagttaggtaatgtatatttatccatcgtcaaatttaaaacatatttgaacttaacttcagatgatggtgcatccatagcatttttataatttcccaaatacacattattggttacccttgtcattatagtgggagatttggctttgtgcatatctccagttgaacgtagtagtaagtatttatacaaacttttcttatccatttataacgtacaaatggataaaactactttatcggtaaacgcgtgtaatttagaatacgttagagaaaaggctatagtaggcgtacaagcagccaaaacatcaacacttatattctttgttattatattggcaattagtgcgctattactctggtttcagacgtctgataatccagtctttaatgaattaacgagatatatgcgaattaaaaatacggttaacgattggaaatcattaacggatagcaaaacaaaattagaaagtgatagaggtagacttctagccgctggtaaggatgatatattcgacttcaaatgtgtggatttcggcgcctattttatagctatgcgattggataagaaaacatatctgccgcaagctattaggcgaggtactggagacgcgtggatggttaaaaaggcggcaaaggtcgatccatctgctcaacaattttgtcagtatttgataaaacacaagtctaataatgttattacttgtggtaatgagatgttaaatgaattaggttatagcggttattttatgtcaccgcattggtgttccgattttagtaatatggaatagtgttagataaatgcggtaacgaatgttcctgtaaggaaccataacagtttagatttaacgttaaagatgagcataaacataataaacaaaattacaatcaaacctataacattaatatcaaacaatccaaaaaatgaaatcagtggagtagtaaacgcgtacataactcctggataacgtttagcagctgccgttcctattctagaccaaaaattcggtttcatgttttcgaagcggtgttctgcaacaagtcggggatcgtgttctacatatttggcggcgttatccagtatctgcctattgatcttcatttcgttttcgattctggctatttcaaaataaaatcccgatgatagacctccagactttataatttcatctacgatgttcagcgccgtagtaactctaataatataggctgataagctaacatcataccctcctgtatatgtgaatatggcatgatttttgtccattacaagctcggttttaactttattgcctgtaataatttctctcatctgtaggatatctatttttttgtcatgcattgccttcaagacgggacgaagaaacgtaatatcctcaataacgttatcgttttctacaataactacatattctacctttttattttctaactcggtaaaaaaattagaatcccatagggctaaatgtctagcgatatttcttttcgtttcctctgtacacatagtgttacaaaaccctgaaaagaagtgagtatacttgtcatcatttctaatgtttcctccagtccactgtataaacgcataatccttgtaatgatctggatcatccttgactaccacaacatttcttttttctggcataacttcgttgtcctttacatcatcgaacttctgatcattaatatgctcatgaacattaggaaatgtttctgatggaggtctatcaataactggcacaacaataacaggagttttcaccgccgccatttagttattgaaattaatcatatacaactctttaatacgagttatattttcgtctatccattgtttcacatttacatatttcgacaaaaagatataaaatgcgtattccaatgcttctctgtttaatgaattactaaaatatacaaacacgtcactgtctggcaataaatgatatcttagaatattgtaacaatttattttgtattgcacatgttcgtgatctatgagttcttcttcgaatggcataggatctccgaatctgaaaacgtataaataggagttagaataataatatttgagagtattggtaatatataaactctttagcggtataattagtttttttctctcaatttctatttttagatgtgatggaaaaatgactaattttgtagcattagtatcatgaactctaatcaaaatcttaatatcttcgtcacacgttagctctttgaagtttttaagagatgcatcagttggttctacagatggagtaggtgcaacaattttttgttctacacatgtatgtactggagccattgttttaactataatggtgcttgtatcgaaaaactttaatgcagatagcggaagctcttcgccgcgactttctacatcgtaattgggttctaacgccgatctctgaatggatactagttttctaagttctaatgtgattctctgaaaatgtaaatccaattcctccggcattatagatgtgtatacatcggtaaataaaactatagtatccaacgatcccttctcgcaaattctagtcttaaccaaaaaatcgtatataaccacggagatggcgtatttaagagtggattcttctaccgttttgttcttggatgtcatataggaaactataaagtccgcactactgttaagaatgattactaacgcaactatatagttcaaattaagcattttggaaacataaaataactctgtagacgatacttgactttcgaataagtttgcagacaaacgaagaaagaacagacctctcttaatttcagaagaaaactttttttcgtattcctgacgtctagagtttatatcaataagaaagttaagaattagtcggttaatgttgtatttcattacccaagtttgagatttcataatattatcaaaagacatgataatattaaagataaagcgctgactatgaacgaaatagctatatggttcgctcaagaatatagtcttgttaaacgtggaaacgataactgtatttttaatcacgtcagcggcatctaaattaaatataggtatatttattccacacactctacaatatgccacaccatcttcataataaataaattcgttagcaaaattattaattttagtgaaatagttagcgtcaactttcatagcttccttcaatctaatttgatgctcacacggtgcgaattccactctaacatcccttttccatgcctcaggttcatcgatctctataatatctagtttcttgcgtttcacaaacacgggctcgtctctcgcgatgagatctgtatagtaactatgtaaatgataactagatagaaagatgtagctatatagatgacgatcctttaagagaggtataataactttaccccaatcagataaactattgttatggtcttcggaaaaagaatttttataaatttttccagtattttccaaatatacgtacttgacatctaaaaaatccttaatgataataggaatggataatccgtctattttataaagaaatacatatcgcacattatacttttttttggaaatgggaataccgatgtgtctacataaatatgcaaagtctaaatattttttagagaatcttagttggtccaaattcttttccaagtacggtaatagatttttcatattgaacggtatcttcttaatctctggttctagttccgcattaaatgatgaaactaagtcactatttttataactaacgattacatcacctctaacatcatcatttaccagaatactgatcttcttttgtcgtaaatacatgtctaatgtgttaaaaaaaagatcatacaagttatacgtcatttcatctgtggtattcttgtcattgaaggataaactcgtactaatctcttctttaacagcctgttcaaatttatatcctatatacgaaaaaatagcaaccagtgtttgatcatccgcgtcaatattctgttctatcgtagtgtataacaatcgtatatcttcttctgtgatagtcgatacgttataaaggttgataacgaaaatatttttatttcgtgaaataaagtcatcgtaggattttggacttatattcgcgtctagtagatatgcttttatttttggaatgatctcaattagaatagtctctttagagtccatttaaagttacaaacaactaggaaattggtttatgatgtataatttttttagtttttatagattctttattctatacttaaaaaatgaaaataaatacaaaggttcttgagggttgtgttaaattgaaagcgagaaataatcataaattatttcattatcgcgatatccgttaagtttgtatcgtaatggcgtggtcaattacaaataaagcggatactagtagcttcacaaagatggctgaaatcagagctcatctaaaaaatagcgctgaaaataaagataaaaacgaggatattttcccggaagatgtaataattccatctactaagcccaaaaccaaacgagccactactcctcgtaaaccagcggctactaaaagatcaaccaaaaaggaggaagtggaagaagaagtagttatagaggaatatcatcaaacaactgaaaaaaattctccatctcctggagtcagcgacattgtagaaagcgtggccgctgtagagctcgatgatagcgacggggatgatgaacctatggtacaagttgaagctggtaaagtaaatcatagtgctagaagcgatctttctgacctaaaggtggctaccgacaatatcgttaaagatcttaagaaaattattactagaatctctgcagtatcgacggttctagaggatgttcaagcagctggtatctctagacaatttacttctatgactaaagctattacaacactatctgatctagtcaccgagggaaaatctaaagttgttcgtaaaaaagttaaaacttgtaagaagtaaatgcgtgcacttttttataaagatggtaaactctttaccgataataattttttaaatcctgtatcagacgataatccagcgtatgaggttttgcaacatgttaaaattcctactcatttaacagatgtagtagtatatgaacaaacgtgggaggaggcgttaactagattaatttttgtgggaagcgattcaaaaggacgtagacaatacttttacggaaaaatgcatgtacagaatcgcaacgctaaaagagatcgtatttttgttagagtatataacgttatgaaacgaattaattgttttataaacaaaaatataaagaaatcgtccacagattccaattatcagttggcggtttttatgttaatggaaactatgttttttattagatttggtaaaatgaaatatcttaaggagaatgaaacagtagggttattaacactaaaaaataaacacatagaaataagtcccgatgaaatagttatcaagtttgtaggaaaggacaaagtttcacatgaatttgttgttcataagtctaatagactatataagccgctattgaaactgacggatgattctagtcccgaagaatttctgttcaacaaactaagtgaacgaaaggtatacgaatgtatcaaacagtttggtattagaatcaaggatctccgaacgtatggagtcaattatacgtttttatataatttttggacaaatgtaaagtccatatctcctcttccatcaccaaaaaagttaatagcgttaactatcaaacaaactgctgaagtggtaggtcatactccatcaatttcaaaaagagcttacatggcaacgactattttagaaatggtaaaggataaaaattttttagatgtagtatctaaaactacgttcgatgaattcctatctatagtcgtagatcacgttaaatcatctacggatggatgatatagatctttacacaaataattacaagaccgataaatggaaatggataagcgtatgaaatctctcgcaatgacagctttcttcggagagctaaacacattagatattatggcattgataatgtctatatttaaacgccatccaaacaataccattttttcagtggataaggatggtcagtttatgattgatttcgaatacgataattataaggcttctcaatatttggatctgaccctcactccgatatctggagatgaatgcaagactcacgcatcgagtatagccgaacaattggcgtgtgtggatattattaaagaggatattagcgaatatatcaaaactactccccgtcttaaacgatttataaaaaaataccgcaatagatcagatactcgtatcagtcgagatacagaaaagcttaaaatagctctagctaaaggcatagattacgaatatataaaagacgcttgttaataagtaaatgaaaaaaaactagtcgtttataataaaacacaatatggatgccaacatagtatcatcttctactattgcaacgtatatagacgctttagcaaagaatgcttcagaattagaacagaggtctaccgcatacgaaataaataatgaattggaactagtatttattaagccgccattaattactttgacaaatgtagtgaatatctctacgattcaggaatcgtttattcgatttaccgttactaataaggaaggtgtcaaaattagaactaagattccattatctaaggtacatggtctagatgtaaaaaatgtacagttagtagatgctatagataacatagtttgggaaaagaaatcattagtgacggaaaatcgtcttcacaaagaatgcttgttgagactatcgacagaggaacgtcatatatttttggattacaagaaatatggatcctctatccgactagaattagtcaatcttattcaagcaaaaacaaaaaactttacgatagactttaagctaaaatattttctaggatccggtgcccaatctaaaagttctttgttgcacgctattaatcatccaaagtcaaggcctaatacatctctggaaatagaattcacacctagagacaatgaaaaagttccatatgatgaactaataaaggaattgacgactctatcacgtcatatatttatggcttctccagagaatgtaattctttctccgcctattaacgcacctataaagacttttatgttgcctaaacaagatatagtaggtctggatctggaaaatctatatgccgtaactaagactgacggcattcctataactatcagagttacatcaaacgggttgtattgttattttacacatcttgggtatattattagatatccagttaagagaataatagattccgaagtagtagtctttggtgaggcagttaaggataagaactggaccgtatatctcattaagctaatagagcctgtgaatgcaatcaatgatagactagaagaaagtaagtatgttgaatctaaactagtggatatttgtgatcggatagtattcaagtcaaagaaatatgaaggtccgtttactacaactagtgaagtcgtcgatatgttatctacatatttaccaaagcaaccagaaggtgttattctgttctattcaaagggacctaaatctaacattgattttaaaattaaaaaggaaaatactatagaccaaactgcaaatgtagtatttaggtacatgtccagtgaaccaattatctttggagaatcgtctatctttgtagagtataagaaatttagcaacgataaaggctttcctaaagaatatggttctggtaagattgtgttatataacggcgttaattatctaaataatatctattgtttggaatatattaatacacataatgaagtgggtattaagtccgtggttgtacctattaagtttatagcagaattcttagttaatggagaaatacttaaacctagaatcgataaaaccatgaaatatattaactcagaagattattatggaaatcaacataatatcatagtcgaacatttaagagatcaaagcatcaaaataggagatatctttaacgaggataaactatcggatgtgggacatcaatacgccaataatgataaatttagattaaatccagaagttagttattttacgaataaacgaactagaggaccgttgggaattttatcaaactacgtcaagactcttcttatttctatgtattgttccaaaacatttttagacgattccaacaaacgaaaggtattggcgattgattttggaaacggtgctgacctggaaaaatacttttatggagagattgcgttattggtagcgacggatccggatgctgatgctatagctagaggaaatgaaagatacaacaaattaaactctggaattaaaaccaagtactacaaatttgactacattcaggaaactattcgatccgatacatttgtctctagtgtcagagaagtattctattttggaaagtttaatatcatcgactggcagtttgctatccattattcttttcatccgagacattatgctaccgtcatgaataacttatccgaactaactgcttctggaggcaaggtattaatcactaccatggacggagacaaattatcaaaattaacagataaaaagacttttataattcataagaatttacctagtagcgaaaactatatgtctgtagaaaaaatagctgatgatagaatagtggtatataatccatcaacaatgtctactccaatgactgaatacattatcaaaaagaacgatatagtcagagtgtttaacgaatacggatttgttcttgtagataacgttgatttcgctacaattatagaacgaagtaaaaagtttattaatggcgcatctacaatggaagatagaccgtctacaaaaaactttttcgaactaaatagaggagccattaaatgtgaaggtttagatgtcgaagacttacttagttactatgttgtttatgtcttttctaagcggtaaataataatatggtatgggttctgatatccccgttctaaatgcattaaataattccaatagagcgatttttgttcctataggaccttccaactgtggatactctgtattgttaatagatatattaatacttttgtcgggtaacagaggttctacgtcttctaaaaataaaagtttgataacatctggcctgttcataaataaaaacttggcgattctatatatactcttattatcaaatctagccattgtcttatagatgtgagctactgtaggtgtaccatttgattttctttctaatactatatatttctctcgaagaagttcttgcacatcatctgggaataaaatactactgttgagtaaatcagttattttttttatatcgatattgatggacatttttatagttaaggataataagtatcccaaagtcgataacgacgataacgaagtatttatacttttaggaaatcacaatgactttatcagatcaaaattaacaaaattaaaggagcatgtatttttttctgaatatattgtgactccagatacatatggatctttatgcgtcgaattaaatgggtctagttttcagcacggtggtagatatatagaggtggaggaatttatagatgctggaagacaagttagatggtgttctacatccaatcatatatctgaagatatacccgaagatatacacactgataaatttgtcatttatgatatatacacttttgacgctttcaagaataaacgattggtattcgtacaggtacctccgtcgttaggagatgatagctatttgactaatccgttattgtctccgtattatcgtaattcagtagccagacaaatggtcaatgatatgatttttaatcaagattcatttttaaaatatttattagaacatctgattagaagccactatagagtttctaaacatataacaatagttagatacaaggataccgaagaattaaatctaacgagaatatgttataatagagataagtttaaggcgtttgtattcgcttggtttaacggcgtttcggaaaatgaaaaggtactagatacgtataaaaaggtatctaatttgatataatgaattcagtgactgtatcacacgcgccatatactattacttatcacgatgattgggaaccagtaatgagtcaattggtagagttttataacgaagtagccagttggctgctacgagacgagacgtcgcctattcctgataagttctttatacagttgaaacaaccgcttagaaataaacgagtatgtgtgtgcggtatagatccgtatccgaaagatggaactggtgtaccgttcgaatcaccaaattttacaaaaaaatcaattaaggagatagcttcatctatatctagattaaccggagtaattgattataaaggttataaccttaatataatagacggggttataccctggaattattacttaagttgtaaattaggagaaacaaaaagtcacgcgatctactgggataagatttccaagttactgctgcagcatataactaaacacgttagtgttctttattgtttgggtaaaacagatttctcgaatatacgggcaaagttagaatccccggtaactaccatagtgggatatcatccagcggctagagaccgtcaattcgagaaagatcgatcatttgaaattatcaacgttttactggaattagacaacaaggtacctataaattgggctcaagggtttatttattaatgctttagtgaaattttaacttgtgttctaaatggatgcggctattagaggtaatgatgttatctttgttcttaagactataggtgtcccgtcagcgtgcagacaaaatgaagatccaagatttgtagaagcatttaaatgcgacgagttagaaagatatattgagaataatccagaatgtacactattcgaaagtcttagggatgaggaagcatactctatagtcagaattttcatggatgtagatttagacgcgtgtctagacgaaatagattatttaacggctattcaagattttattatcgaggtgtcaaactgtgtagctagattcgcgtttacagaatgcggcgccattcatgaaaatgtaataaaatccatgagatctaatttttcattgactaagtctacaaatagagataaaacaagttttcatattatctttttagacacgtataccactatggatacattgatagctatgaaacgaacactattagaattaagtagatcatctgaaaatccactaacaagatcgatagacactgccgtatataggagaaaaacaactcttcgggttgtaggtactaggaaaaatccaaattgcgacactattcatgtaatgcaaccacctcatgataatatagaagattacctattcacttacgtggatatgaacaacaatagttattacttttctctacaacgacgattggaggatttagttcctgataagttatgggaaccagggtttatttcattcgaagacgctataaaaagagtttcaaaaatattcattaattctataataaactttaatgatctcgatgaaaataattttacaacggtaccactggtcatagattacgtaacaccttgtgcattatgtaaaaaacgatcgcataaacatccgcatcaactatcgttggaaaatggtgctattagaatttacaaaactggtaatccacatagttgtaaagttaaaattgttccgttggatggtaataaactgtttaatattgcacaaagaattttagacactaactctgttttattaaccgaacgaggagaccatatagtttggattaataattcatggaaatttaacagcgaagaacccttgataacaaaactaattttgtcaataagacatcaactacctaaggaatattcaagcgaattactctgtccaagaaaacgaaagactgtagaagctaacatacgagacatgttagtagattcagtggagaccgatacctatccggataaacttccgtttaaaaatggtgtattggacctggtagacggaatgttttactctggagatgatgctaaaaaatatatgtgtactgtatcaaccggatttaaatttgacgatacaaagttcgtcgaagacagtccagaaatggaagagttaatgaatatcattaacgatatccaaccattaacggatgaaaataagaaaaatagagagctatatgaaaaaacattatctagttgtttatgcggtgctaccaaaggatgtttaacattcttttttggagaaactgcaactggaaagtcgacaaccaaacgtttgttaaagtctgctatcggtgacctgtttgttgagacgggtcaaacaattttaacagatgtattggataaaggacctaatccatttatcgctaacatgcatttgaaaagatctgtattctgtagcgaactacctgattttgcatgtagtgggtcaaagaaaatcagatctgataatattaaaaagttgacagaaccttgtgtcattggaagaccgtgtttctccaataaaattaataatagaaaccatgcgacaatcattatcgatactaattacaaacctgtttttgataggatagataacgcattaatgagaagaattgccgtcgtgcgattcagaacacacttttctcaaccttctggtagagaggctgctgaaaataatgacgcgtacgataaagtcaaactattagacgaggggttagatggtaaaatacaaaataatagatatagattcgcatttctatacttgttggtgaaatggtacagaaaatatcatgttcctattatgaaactatatcctacacccgaagagattcctgactttgcattctatctcaaaataggtactctgttggtatctagctctgtaaagcatattccattaatgacggacctctccaaaaagggatatatattgtacgataatgtggtcactcttccgttgactactttccaacagaaaatatccaagtattttaattctagactatttggacacgatatagagagcttcatcaatagacataagaaatttgccaatgttagtgatgaatatctgcaatatatattcatagaggatatttcatctccgtaaatatatgctcatatatttatagaagatatcacatatctaaatgaataccggaattatagatttatttgataatcatgttgatagtataccaactatattacctcatcagttagctactctagattatctagttagaactatcatagatgagaacagaagcgtgttattgttccatattatgggatcaggtaaaacaataatcgctttgttgttcgccttggtagcttccagatttaaaaaggtttacattctagtgccgaacatcaacatcttaaaaattttcaattataatatgggtgtagctatgaacttgtttaatgacgaattcatagctgagaatatctttattcattccacaacaagtttttattctcttaattataacgataacgtcattaattataacggattatctcgctacaataactctatttttatcgttgatgaggcacataatatctttgggaataatactggagaacttatgaccgtgataaaaaataaaaacaagattccttttctactattgtctggatctcccattactaacacacctaatactctgggtcatattatagatttaatgtccgaagagacgatagattttggtgaaattattagtcgtggtaagaaagtaattcagacacttcttaacgaacgcggtgtgaatgtacttaaggatttgcttaaaggaagaatatcatattacgaaatgcctgataaagatctaccaacgataagatatcacggacgtaagtttctagatactagagtagtatattgtcacatgtctaaacttcaagagagagattatatgattactagacgacagctatgttatcatgaaatgtttgataaaaatatgtataacgtgtcaatggcagtattgggacaacttaatctgatgaataatttagatactttatttcaggaacaggataaggaattgtacccaaatctgaaaataaataatggcgtgttatacggagaagaattggtaacgttaaacattagttccaaatttaaatactttattaatcggatacagacactcaacggaaaacattttatatacttttctaattctacatatggcggattggtaattaaatatatcatgctcagtaatggatattctgaatataatggttctcagggaactaatccacatatgataaacggcaaaccaaaaacatttgctatcgttactagtaaaatgaaatcgtctttagaggatctattagatgtgtataattctcctgaaaacgatgatggtagtcaattgatgtttttgttttcatcaaacattatgtccgaatcctatactctaaaagaggtaaggcatatttggtttatgactatcccagatactttttctcaatacaaccaaattcttggacgatctattagaaaattctcttacgccgatatttctgaaccagttaatgtatatcttttagccgccgtatattccgatttcaatgacgaagtgacgtcattaaacgattacacacaggatgaattaattaatgttttaccatttgacatcaaaaagctgttatatctaaaatttaagacgaaagaaacgaatagaatatactctattcttcaagagatgtctgaaacgtattctcttccaccacatccatcaattgtaaaagttttattgggagaattggtcagacaatttttttataataattctcgtattaagtataacgataccaagttacttaaaatggttacatcagttataaaaaataaagaagacgctaggaattacatagatgatattgtaaacggtcacttctttgtatcgaataaagtatttgataaatctcttttatacaaatacgaaaacgatattattacagtaccgtttagactttcctacgaaccatttgtttggggagttaactttcgtaaagaatataacgtggtatcttctccataaaactgatgagatatataaagaaataaatgtcgagctttgttaccaatggataccttccagttacattggagccacacgagctgacgttagacataaaaactaatattaggaatgccgtatataagacgtatctccatagagaaattagtggtaaaatggccaagaaaatagaaattcgtgaagacgtggaattacctctcggcgaaatagttaataattctgtagttataaacgttccgtgtgtaataacctacgcgtattatcacgttggggatatagttagaggaacattaaacatcgaagatgaatcaaatgtaactattcaatgtggagatttaatctgtaaactaagtagagattcgggtactgtatcatttagcgattcaaagtactgcttttttcgaaatggtaatgcgtatgacaatggcagcgaagtcactgccgttctaatggaggctcaacaaggtatcgaatctagttttgtttttctcgcgaatatcgtcgactcataagaaagagaatagcggtaagtataaacacgaatactatggcaataattgcgaatgttttattcccttcgatatatttttgataatatgaaaaacatgtctctctcaaatcggacaaccatctcataaaatagttatctcgcgctggcgaggtggttgccgctcgtataatctccccagaataatatacttgcgtgtcgtcgttcaatttatacggatttctatagttctctgttatataatgcggttttccatcatgattagacgacgacaatagtgttctaaatttagatagttgatcagaatgaatgtttattggcgttggaaaaattatccatgctgcgtctgcagagtggttgatagttgttcctagatatgtaaaataatccaacgtactaggtagcaaattgtctagataaaatactgaatcaaacggcgcagacgtattagcggatctaatggaatccaattgattgactatcttttgaaaatatacatttttatgatccgatacttgtaagaatatagaaataatgataagtccatcatcgtgtttttttgcctcttcataagaactatattttttcttattccaatgaacaagattaatctctccagagtatttgtacacatctatcaagtgattggatccataatcgtcttcctttccccaatatatatgtagtgatgataacacatattcattggggagaaaccctccacttatatatcctcctttaaaattaatccttactagttttccagtgttctggatagtggttggtttcgactcattataatgtatgtctaacggcttcaatcgcgcgttagaaattgcttttttagtttctatattaataggagatagttgttgcggcatagtaaaaatgaaatgataactgtttaaaaatagctcttagtatgggaattacaatggatgaggaagtgatatttgaaactcctagagaattaatatctattaaacgaataaaagatattccaagatcaaaagacacgcatgtgtttgctgcgtgtataacaagtgacggatatccgttaataggagctagaagaacttcattcgcgttccaggcgatattatctcaacaaaattcagattctatctttagagtatccactaaactattacggtttatgtactacaatgaactaagagaaatctttagacggttgagaaaaggttctatcaacaatatcgatcctcactttgaagagttaatattattgggtggtaaactagataaaaaggaatctattaaagattgtttaagaagagaattaaaagaggaaagtgatgaacgtataacagtaaaagaatttggaaatgtaattctaaaacttacaacacgggataaattatttaataaagtatatataggttattgcatggcgtgttttattaatcaatcgttggaggatttatcgcatactagtatttacaatgtagaaattagaaagattaaatcattaaatgattgtattaacgacgataaatacgaatatctgtcttatatttataatatgctagttaatagtaaatgaacttttacagatctagtataattagtcagattattaagtataatagacgactagctaagtctattatttgcaaggatgactctcaaattattacactcacggcattcgttaaccaatgcctatggtgtcataaacgagtatccgtgtccgctattttattaactactgataacaaaatattagtatgtaacagacgagatagttttctctattctgaaataattagaactagaaacatgtttagaaagaaacgattatttctgaattattccaattatttgtccaaacaggaaagaagtatactatcgtcatttttttctctatatccagctactgctgataatgatagaatagacgctatttatccgggtggcatacccaaaaggggtgagaatgttccagagtgtctatccagggaaatcaaagaagaagttaatatagacaattcttttgtattcatagacactcggttttttattcatggtatcatagaagataccattatcaacaaattttttgaggtaattttctttgtcggaagaatatctctaacgagtgatcaaattattgatacctttaaaagtaatcatgaaatcaaggatctaatatttttagatccgaattcaggtaatggactccaatacgaaattgcaaaatatgctctagatactgcaaaacttaaatgttacggccatagaggatgttattatgaatcattaaaaaaattaactgaggatgattgattagaaaatataaattaatttaccatcgtgtatttttataacgggattgtccggcatatcatgtagatagttaccgtctacatcgtatactcgaccatctacgcctttaaatcctctatttattgacattaatctattagaattggaataccaaatattagtaccctcaattagtttattggtaatattttttttagacgatagatcgatggctcttgaaaccaaggttttccaaccggactcattgtcgatcggtgagaagtctttttcattagcatgaatccattctaatgatgtatgtttaaacactctaaacaattggacaaattcttttgatttgctttgaatgatttcaaataggtcttcgtctacagtaggcataccattagataatctagccattataaagtgcacgtttacatatctacgttctggaggagtaagaacgtgactattgagacgaatggctcttcctactatctgacgaagagacgcctcgttccatgtcatatctaaaatgaagatatcattaattgagaaaaaactaataccctcgcctccactagaagagaatacgcatgttttaatgcattctccgttagtgtttgattcttggttaaactcagccaccgccttgattctagtatcttttgttctagatgagaactctatattagagataccaaagactttgaaatatagtaataagatttctattcctgactgattaacaaatggttcaaagactagacatttaccatgggatgctaatattcccaaacatacatctataaatttgacgcttttctcttttaattcagtaaatagagagatatcagccgcactagcatcccctttcaatagttctccctttttaaaggtatttaatgcggatttagaaaactctctatctcttaatgaatttttaaaatcattatatagtgttgctatctcttgcgcgtattcgccgggatcacgattttgtctttcaggaaagctatcgaacgtaaacgtagtagccatacgtctcagaattctaaatgatgatataccagtttttatttctgcgagtttagccttttgataaatctcttcttgcttttttgacatattaacgtatcgcattaatactgttttcttagcgaatgatgcagacccttctacgttatcaaaaatagaaaactcgttattaactatgtacgaacataggcctcctagtttggagactaattctttttcatcgactagacgtttattctcaaatagtgattggtgttgtaaggatcctggtcgtagtaagttaaccaacatggtgaattcttgcacactattgacgataggtgtagccgataaacaaatcatcttatggttttttaatgcgatggtcttggataaaaaattatatactgaacgagtaggacggatcttaccatcttctttgattaatgatttagaaatgaagttatgacattcatcaataatgacgcatattctactcttggaattaatagttttgatattagtaaaaaatttatttctaaaattttgatcatcgtaattaataaaaatacaatccttcgttatctctggagcgtatctgagtatagtgttcatccaaggatcttctatcaaagcctttttcaccaataagataatagcccaattcgtataaatatccttaagatgtttgagaatatatacagtagtcattgttttaccgacacccgtttcatggaacaataaaagagaatgcatactgtctaatcctaagaaaactcttgctacaaaatgttgataatccttgaggcgtactacgtccgaccccatcatttcaacgggcatattagtagttctgcgtaaggcataatcgatataggccgcgtgtgatttactcatttatgagtgataagtaataactatgttttaaaaatcacagcagtagtttaactagtcttctctgatgtttgttttcgatactttttgaatcagaagtcatactagaataaagcaacgagtgaacgtaatagagagcttcgtatactctattcgaaaactctaagaacttattaatgaattccgtatccactggattgtttaaaatactaaattgaacactgttcacatccttccaagaagaagacttagtgacggacttaacatgagacataaataaatccaaattttttttacaaacatcactagccaccataatggcgctatctttcaaccagctatcgcttacgcattttagcagtctaacatttttaaagagactacaatatattctcatagtatcgattacacctctaccgaataaagttggaagtttaataatacaatatttttcgtttacaaaatcaaataatggtcgaaacacgtcgaaggttaacatcttataatcgctaatgtatagattgttttcagtgagatgattattagatttaatagcatctcgttcacgtttgaacagtttattgcgtgcgctgaggtcggcaactacggcgtccgctttagtactcctcccataatactttacgctattaatctttaaaatttcatagactttatctagatcgctttctggtaacatgatatcatgtgtaaaaagttttaacatgtcggtcggcattctatttagatcattaactctagaaatctgaagaaagtaattagctccgtattccagactaggtaatgggcttttacctagagacagattaagttctggcaatgtttcataaaatggaagaaggacatgcgttccctcccggatattttttacaatttcatccatttacaactctatagtttgttttcattattattagttattatctcccataatcttggtaatacttaccccttgatcgtaagataccttatacaggtcattacatacaactaccaattgtttttgtacataatagattggatggttgacatccatggtggaataaactactcgaacagatagtttatctttccccctagatacattggccgtaatagttgtcggcctaaagaatatctttggtgtaaagttaaaagttagggttcttgttccattattgctttttgtcagtagttcattataaattctcgagatgggtccgttctctgaatatagaacatcatttccaaatctaacttctagtctagaaataatatcggtcttattcttaaaatctattcccttgatgaagggatcgttaatgaacaaatccttggcctttgattcggctgatctattatctccgttatagacgttacgttgactagtccaaagacttacaggaatagatgtatcgatgatgttgatactatgtgatatgtgagcaaagattgttctcttagtggcatcactatatgttccagtaatggcggaaaactttttagaaatgttatatataaaagaattttttcgtgttccaaacattagcagattagtatgaagataaacactcatattatcaggaacattatcaatttttacatacacatcagcatcttgaatagaaacgataccatcttctggaacctcaacaatctcggcagactccggataaccagtcggtggaccatcgctaacaataactagatcatccaacaatctactcacatatgcatctatataatctttttcatcttgtgagtaccctggatacgaaataaatttattatccgtatttccataataaggtttagtataaacagagagcgatgttgccgcatgaacttcagttacagtcgccgttggttggtttatttgacctattactctcctaggtttctctataaacgatggtttaatttgtacattcttaaccatatatccaataaagctcaattcaggaacataaacaaattctttgttgaacgtttcaaagtcgaacgaagagtcacgaataacgatatcggatactggattgaaggttaccgttacggtaatttttgaatcggatagtttaagactgctgaatgtatcttccacatcaaacggagttttaatataaacgtatactgtagatggttctttaatagtgtcattaggagttaggccaatagaaatatcattaagttcactagaatatccagagtgtttcaaagcaattgtattattgatacaattattatataattcttcgccctcaatttcccaaataacaccgttacacgaagagatagatacgtgattaatacatttatatccaacatatggtacgtaaccgaatcttcccatacctttaacttctggaagttccaaactcagaaccaaatgattaagcgcagtaatatactgatccctaatttcgaagctagcgatagcctgattgtctggaccatcgtttgtcataactccggatagagaaatatattgcggcatatataaagttggaatttgactatcgactgcgaagacattagaccgtttaatagagtcatccccaccgatcaaagaattaatgatagtattattcattttctatttaaaatggaaaaagcttacaataaactccgtagagaaatatctataatttgtgagttttccttaaagtaacagcttccgtaaacgccgtctttatctcttagtaagtttattgtatttataaccttttccttatcttcatagaatactaaaggcaacaaagaaatttttggttcttctctaagagctacgtgagacttaaccatagaagccaacgaatccctacatattttagaacagaaataccctacttcaccacccttgtatgtctcaatactaataggtctaaaaaccaaatcttgattacaaaaccaacacttatcaattacactatttgtcttaatagacacatctgccatagatttataatactttggtagtatacaagcgagtgcttcttctttagcgggcttaaagactgctttaggtgctgaaataaccacatctggaaggcttactcgcttagccatttaattacggaactatttttttatacttctaatgagcaagtagaaaacctctcatctacaaaaacatactcgtgtccataatcctctaccatagttacacgttttttagatctcatatgtgctaaaaagttttcccatactaattggttactattatttttcgtataatttttaacagtttgaggttttagatttttagttacagaagtgatatcgaatattttatccaaaaagaatgaataattaattgtcttagaaggagtgttttcttggcaaaagaataccaagtgcttaaatatttctactacttcattaatcttttctgtactcagattcagtttctcatcttttacttgattgattatttcaaagactaacttataatcctttttatttattctctcgttagccttaagaaaactagatacaaaatttgcatctacatcatccgtggatatttgatttttttccatgatatccaagagttccgagataatttctccagaacattgatgagacaataatctccgcaatacatttctcaaatgaataagtttattagacacgtggaagtttgactttttttgtacctttgtacatttttgaaataccgactcgcaaaaaatacaatattcatatccttgttcagatactataccgttgtgtctacaaccgctacataatcgtagattcatgttaacactctacgtatctcgtcgtccaatattttatataaaaacattttatttctagacgttgccagaaaatcctgtaatacttttagttttttgggctgtgaataaagtatcgccctaatatggttaccgtcctccgccaatatagtagttaaattatccgcacatgcaaaagaacaccgcttaggcggattcagtacaatgttatatttttcgtaccaactcatttaaatatcataatctaaaatagttctgtaatatgtctagcgctaatatattgatcataatcctgtgcataaattaagatacaacaatgtctcgaaatcatcgacatggcttcttccatagttagaagatcgtcgtcaaagttagcaacgtgattcatcaacatttgctgttttgaggcagcaaatactgaaccgtcgccattcaaccattcataaaaaccatcgtctgaatccattgataatttcttgtactggtttttgagagctcgcatcaatctagcatttctagctcccggattgaaaacagaaagaggatcgtacatccagggtccattttctgtaaatagaatcgtataatgtcccttcaagaagatatcagacgatccacaatcaaagaattggtctccgagtttgtaacaaactgcggactttaacctatacatgataccgtttagcataatttctggtgatacgtcaatcggagtatcatctattagagatctaaagccggtgtaacattctccaccaaacatattcttattctgacgtcgttctacataaaacatcattgctccattaacgataacaggggaatgaacagcactacccatcacattagttcccaatggatcaatgtgtgtaactccagaacatcttccatagcctatgttaggaggagcgaacaccactcttccactattgccatcgaatgccatagaataaatatccttggaattgatagaaatcggactgtcggatgttgtgatcatcttcataggattaacaacgatgtatggtgccgcctgaagtttcatatcgtaactgatgccgttcataggtctagccacagaaaccaacgtaggtctaaatccaactatagacaaaatagaagccaatatctgttcctcatctgtcataacttgagagcatccagtatgaataatcttcattagatggggatctaccgcatcatcatcgttacaataaaaaattcccattctaatgttcataattgcttttctaatcatggtatgcatgtttgctctctgaatctctgtggaaattagatctgatacacctgtaatcactatcggattatcctccgtaagacgattaaccaacaacatataattataagactttacttttctaaattcataaagttgctggattaggctataggtgtctccatgtacatacgcgttctcgagcgcaggaagtttaataccgaatagtgccatcagaataggatgaatatagtaattagtttctggttttctataaataaaagacaaatcttgtgaactagacatatcggtaaaatgcatggattggaatcgtgtagtcgacagaagaatatgatgattagatggagagtatattttatctaactctttgagttggtcaccgattctaggactagctcgagaatgaataagtactaaaggatgagtacatttcacagaaacactagcattgttcaatgtgctctttacatgggtaaggagttgaaatagctcgtttctatttgttctgacaatatttagtttattcataatgttaagcatatcctgaatagtaaagttagatgtgtcatacttgttagtagttagatatttagcaattgcattcccatcatttctcaatctcgtactccaatcatgcgtggatgctacttcgtcgatggaaaccatacaatcctttttgataggctgttgagattgattatttcctgcacgtttaggtttggtacgttgatttctagcccctgcggatataaagtcatcgtctacaatttgggacaatgaattgcatacactacaagacaaagatttatcagaagtgtgaatatgatcttcatctaccaaagaaagagtttgattagtataactagattttagtcctgcgttagatgttaaaaaaacatcgctattgaccacggcttccattatttatattcgtagtttttactcgaaagcgtgattttaatatccaatcttattacttttggaatcgttcaaaacctttgactagttgtagaatttgatctattgccctacgcgtatactcccttgcatcatatacgttcgtcaccagatcgtttgtttcggcctgaagttggtgcatatctttttcaacactcgacatgagatccttaagggccatatcgtctagattttgttgagatgctgctcctggatttggattttgttgtgctgttgtacatactgtaccaccagtaggtgtaggagtacatacagtggccacaataggaggttgaggaggtgtaaccgttggagtagtacaagaaatatttccatccgattgttgtgtacatgtagttgttggtaacgtctgagaaggttgggtagatggcggtgtcgtcgtcttttgatctttattaaatttagagataatatcctgaacagcattgctcggcgtcaacgctggaaggagtgaactcgccggcgcatcagtatctgcagacagccaatcaaaaagattagacatatcagatgatgtattagtttgttgtcgtggttttggtgtaggagcagtactactaggtagaagaataggagccgatgtaggtgtcggaaccggctgtggagttatatgaatagttggttgtagcggttggataggctgtctgctggcggccatcatattatctctagctagttgttctcgcaactgtctttgataatacgactcttgagactttagtcctatttcaatcgcttcatcctttttcgtatccggatccttttcttcagaataatagattgacgactttggtgtagaggattctgccagcccctgtgagaacttgttaaagaagtccatttaaggctttaaaattgaattgcgattataagattaaatggcagacacagacgatattatcgactatgaatccgatgatctcactgaatacgaggatgatgaagaagaggaagaagatggagagtcactagaaactagtgatatagatcccaaatcttcttataagattgtagaatcagcatccactcatatagaagatgcgcattccaatcttaaacatatagggaatcatatatctgctcttaaacgacgctatactagacgtataagtctatttgaaatagcgggtataatagcagaaagctataacttgcttcaacgaggaagattacctctagtttcagaattttctgacgaaacgatgaagcaaaatatgctacatgtaattatacaagagatagaggagggttcttgtcctatagtcatcgaaaagaacggagaattgttgtcggtaaacgattttgacaaagatggtctaaaattccatctagactatattatcaaaatttggaaacttcaaaaacgatattagaatttatacgaatatcgttctctaaatgtcacaatcaagtctcgcatgttcagcaatttattgtcgtactttatatcgtgttcattaacgatatcttgcaaaatagtaatgattctatcttccttcgatagatattcttcagagattattgtcttatattctttcttgttatcagatatgaatttgataagactttgaacattattgatacccgtctgtttaattttttctacagatattttagttttggcagattctatcgtatctgtcaatagacatccaacatcgacattcgacgtcaattgtctataaatcaacgtataaattttagaaataacattagcgaattgttgtgcattgatgtcgttattctgaaacagtatgattttaggtagcattttcttaacaaagagaacgtatttattgttactcagttgaacagatgatatatccagattactaacgcatctgattccgtataccaaactttcagaagaaatggtatacaattgtttgtattcattcaatgtctctttttcagaaattagtttagagtcgaatactgcaataattttcaagagatagttttcatcagataagattttatttagtgtagatatgataaaactattgttttgttggagaacttgatacgccgcgttctctgtagtcgacgctctcaaatgggaaacgatctccattatttttttggaatcggatactatatcttcggtatcttgacgcagtctagtatacatagagttaagagagattagagtttgtacattaagcaacatgtctctaaatgtggctacaaacttttccttttccacatcatctagtttattatataccgatttcacaacggcaccagatttaaggaaccagaatgaaaaactctgataactacaatatttcatcatagttacgattttatcatcttctatagttggtgtaatagcgcatacctttttctccaagactggaaccaacgtcataaaaatgtttaaatcaaaatccatatcaacatctgatgcgctaagaccagtctcgcgttcaagattatctttactaatggtgacgaactcatcgtatagaactctaagtttgtccattatttatttacagatttagttgtttaatttatttgtgctcttccagagttgggatagtatttttctaacgtcggtattatattattaggatctacgttcatatgtatcataatattaatcatccacgttttgataaatctatctttagcttctgaaataacgtatttaaacaaaggagaaaaatatttagctacggcatcagacgcaataacattttttgtaaatgtaacgtatttagacgacagatcttcgttaaaaagttttccatctatgtagaatccatcagttgttaacaccattcccgcgtcagattgaataggagtttgaatagtttgttttggaaatagatccttcaataacttatagttgggtgggaaaaaatcgattttatcactagactctttcttttttactatcattacctcatgaactatttcttgaatgagtatatgtattttctttcctatatcggacgcgttcattggaaaatataccatgtcgttaactataagaatatttttatcctcgtttacaaactgaataatatcagatgtagttcgtaaacgaactatatcatcaccagcacaacatctaactatatgatatccactagtttcctttagtcgtttattatcttgttccatattagcagtcattccatcatttaagaaggcgtcaaagataatagggagaaatgacattttggattctgttacaactttaccaaaattaaggatatacggacttactatctttttctcaacgtcaatttgatgaacacacgatgaaaatgtacttcgatgagattgatcatgtagaaaacaacaagggatacaatatttccgcatatcatgaaatatattaagaaatcccaccttattatatttccccaaaggatccatgcacgtaaacattatgccgttatcattaataaagacttctttctcatcggatctgtaaaagttgttactgatttttttcattccaggatctagataattaataatgatgggttttctattcttattctttgtattttggcatatcctagaccagtaaacagtttccactttggtaaaatcagcagacttttgaacgctattaaacatggcattaatggcaataactaaaaatgtaaaatatttttctatgttaggaatatggtttttcactttaatagatatatggtttttggccaaaatgatagatatttttttatccgaggatagtaaaatattattagtcgccgtctctataaaaatgaagctagtctcgatatccaattttattctagaattgataggagtcgccaaatgtaccttatacgttatatctcccttgatgcgttccatttgtgtatctatatcggacacaagatctgtaaatagttttacgttattaatcatcacggtatcgccgtcgctagataatgctaatgtaccatccaagtcccaaatggagagatttaactgttcatcgtttagaataaaatgattaccggtcatattaataaagtgttcatcgtatctagataacaacgacttataattaatgtccaagtcttgaactcgctgaatgatcttttttaacccagttagttttagattggtacgaaatatattgttaaactttgattctacagtaatgtccaaatctagttgtggaaatacttccatcaacattgtttcaaacttgataatattattatctacatcttcatacgatccaaattccggaatagatgtatcacatgctcttgccacccagataaccaaaaagtcacacgctccaggatatacattgtataaaaagctatcgtttttaagtagggtttttttctgcgtgtatacgaagggattaaaaatagtattatcaacgtaactatattccaaattattcttatgagaatagataataatatcgtccttaatatctaacaaatttcctaaatatccctttaattgagtcattcgaagcgtcaatagaatatgtctcttaactatttccggctgttgtatatttaaatgacttcgtaaaaaataatatatgggcgacttctcatctatgtaatcatatggagtgagatatagggctcgttctacctcctgccccttacccacctgtaataccaattgcggacttactatatatcgcatatttatatcgtggggtaaagtgaaaatctactaccgatgatgtaagtcttacaatgttcgaaccagtaccagatcttaatttggaggcctccgtagaactaggggaggtaaatatagatcaaacaacacctatgataaaggaaaatagcggttttatatcccgtagtagacgtctattcgcccatagatctaaggatgatgagagaaaactagcactacgattctttttacaaagactttattttttagatcatagagagattcattatttgttcagatgcgttgacgctgtaaaagacgtcactattaccaaaaaaaataacattatcgtggcgccttatatagcacttttaactatcgcatcaaaaggatgcaaacttacagaaacaatgattgaagcattctttccagaactatataatgaacatagtaagaaatttaaattcaactctcaagtatccatcatccaagaaaaactcggataccagtttggaaactatcacgtttatgattttgaaccgtattactctacagtagctctggctattcgagatgaacattcatctggcatttttaatatccgtcaagagagttatctggtaagttcattatctgaaataacatatagattttatctaattaatctaaaatctgatcttgttcaatggagtgctagtacgggcgctgtaattaatcaaatggtaaatactgtattgattacagtgtatgaaaagttacaactggtcatagaaaatgattcacaatttacatgttcattggctgtggaatcagaacttccaataaaattacttaaagatagaaatgaattatttacaaaattcatcaacgagttaaaaaagaccagttcattcaagataagcaaacgcgataaggatacgctactaaaatattttacttaggactggagttagaatttatagacgactcatttcgtttatcattattactaccatcattattagtattcttcttgttatcttgttcagaaatatacagcaatgctatgcctaatactaaatacattatcatgcttgcaatggctctaacaacgacgaaccaaaatgaatttggtcgtagcttttgttcacaaaaatacataaagaaatgtctacataaatctatggcgccattggctacttgaaatagcgccagtcctcctacagattttaatatagctgtataacatgacatttattcatcatcaaaagagacagagtcaccatctgtcatatttagattttttttcatgtgttcaaagtatcctctactcatttcattataatagtttatcatacttagaattttaggacggatcaatgagtaagacttgactagatcgtcagtagtaatttgtgcatcgtctattctgcatccgcttcgtcgaataatgtatagcatcgctttgagattctccatagctatcaagtctttatacaatgacatggaaatatctgtgaatactttatacttctccaacatcgatgccttaacatcatcgcctactttagcattgaaaatacgttctattgtgtagatggatgtagcaagatttttaaacaacaatgccatcttacacgatgattgcctcaagtctccaatcgtttgtttagaacgattagctacagagttcaacgcttggctgactagcatattattatctttagaaattgtattcttcaatgaagcgtttatcatatctgtgatttcgttagtcatattacagtctgactgggttgtaatgttatccaacatatcacctatggatacggtacacgtaccagcatttgtaataatcctatctaagatgttgtatggcattgcgcagaaaatatcttctcctgtaatatctccactctcgataaatctactcagattattcttaaatgccttattctctggagaaaagatatcagtgtccatcatttcattaatagtatacgcagaaaagataccacgagtatcaattctatccaagatacttatcggttccgagtcacagataatggtttcctctccttcgggagatcctgcatagaaatatctaggacaatagtttctatactgtctgtaactctgataatctctaaagtcactaactgataccatgaaattgagaagatcaaacgctgaagtaatcaatttttctgcctcgtttttactacaactagttttcatcaatgtagtgacgatgtattgtttagttactcttggtctaatactgatgatagagatattattacttcccataatggatcttctagtagtcaccttaaagcccattgatgcaaatagcagatagataaagtcttggtatgactcctttctaatatagtacggactacctttgtcacccaactttatacccacataagccataacaacctctttaatagccgtttcatgaggtttatcagccatgagcctgagtagttggaagaatctcatgaatcccgtctcagaaagtcctatatgcatgatagatttatctttcctgggaaactctcgtatagtcatagatgaaatactcttcaaagtttctgaaataagattagtaacagtcttacctccgactactctgggtaacaaacatactctaataggtgttttctctgcggagataatatcagaaaggatagagcaataagtagtattattgtgattataaagaccgaatacataacaggtagaatttataaacatcatgtcctgaaggtttttagacttgtattcctcgtaatccataccgtcccaaaacatggatttggtaactttgatagccgtagatctttgttccttcgccaacaggttaaagaaattaataaagaatttgttgtttctatttatgtccacaaattgcacgtttggaagcgtaactgttacgttcactgcagcattttgaggatcgcgagtatgaagtacgatgttattgtttactggtatatctggaaagaaatctaccagtctaggaataagagattgatatcgcatagaaatagtaaagtttataatctcatcatcgaagagcattttgttaccattgtaataaatatccactctgtcatatgtataaatgaagtactgttcaaacatgatgagatgtttatatgttggcatagtagtgagatcgacgtttggtaatggcaatgtattaagattaactccataatgtctagcagcatctgcgatgttataagtgtcgtcaaagcggggtcgatcttgtgctgttatatattgtctaacacctataagattatcaaaatcttgtctgcttaatacaccgttaacaatttttgccttgaattcttttattggtgcattaataacatccttatagaggatgttaaacaaataagtgttatcaaagttaagatctggatatttcttttctgctagaacatccattgagtcggagccatctggtttaatataaccaccgataaatctagctctgtattctgtatccgtcaatctaatattaagaaggtgttgagtgaaaggtggaagatcgtaaaagctgtgagtattaatgataggattagtttccgaactaatgttaattggggtattaataatatctatatttccagcgttaagtgtaacattaaacagttttaattcacgtgacgtggtatcaattaaataattaatgcccaatttggatatagcagcctgaagctcatcttgtttagttacggatcctaatgagttattaagcaatatatcgaacggatgaacgaaggttgttttaagttggtcacatactttgtaatctagacatagatgcggaagaacggtagaaactatacgaaataaatattcagagtcctctaattgatcaagagtaactattgacttaataggcatcatttatttagtattaaatgacgaccgtaccagtgacggatatacaaaacgatttaattacagagttttcagaagataattatccatctaacaaaaattatgaaataactcttcgtcaaatgtctattctaactcacgttaacaacgtggtagatagagaacataatgccgccgtagtgtcatctccagaggaaatatcctcacaacttaatgaagatctatttccagatgatgattcaccggccactattatcgaacgagtacaacctcatactactattattgacgatactccacctcctacttttcgtagagagttattaatatcggaacaacgtcaacaacgagaaaaaagatttaatattacagtatcgaaaaatgctgaagcaataatggaatctagatctatgataacttctatgccaacacaaacaccatccttgggagtagtttatgataaagataaaagaattcagatgttagaggatgaagtggttaatcttagaaatcaacgatctaatacaaaatcatctgataatttagataattttaccaaaatactatttggtaagactccgtataaatcaacagaagttaataagcgtatagccatcgttaattatgcaaatttgaacgggtcccccttatcagttgaggacttggatgtttgttcggaggatgaaatagatagaatctataaaacgattaaacaatatcacgaaagtagaaaacgaaaaattatcgtcactaacgtgattattattgtcataaacattatcgagcaggcattgctaaaactcggatttgaagaaatcaaaggactgagtaccgatatcacttcagaaattatcgatgtggagatcggagatgactgcgatgctgtagcatctaaactaggaatcggtaacagtccggttcttaatattgtattgtttatactcaagatattcgttaaacgaattaaaattatttaatttaatacattcccatatccagacaacaatcgtctggattaatctgttcctgtcgtctcataccggacgacatattaatctttttattagtaggcatctttttagatggtttctttttcccagcattaactgagtcgatacctagaagatcgtgattgatctctccgaccattccacgaacttctaattggccgtctctgacggtaccataaactattttaccagcattagtaacagcttggacaatctgaccatccattgcgttgaatgatgtagttgctgttgttctacgtttaggagcaccagaagtatttttggagcccttggaggctgatgtagaagaagacgaggattttgatttacatgtaatacattttgtactctttgattttgtatcacatgcgccggcagtcacatttgtttgagaattaagattattgttgcctcctttgacggctgcatctccaccgatttgcgctagtagatttttaagctgtggtgtaatcttattaactgtttcgatataatcatcgtaactgcttctaacggctaaattttttttatccgccatttagaagctaaaaatatttttatttatgcagaagatttaactagattatacaatgaactaatatgatccttttccagattatttacaaacttggtattttttggttctggaggaggcgaatttaaattcggacttggattcggattttgtgagttcttgatcttattatacatcgagtataggatggcgacggtaactgctacgcaaataccgatcaacaaaagaataccaatcatttattgacaataacttcactattgatcaagtatgcaatatatcatcttttcactaaataagtagtaataatgattcaacaatgtcgagatatatggacgataataatttagttcatggaaatatcgctatgattggtatgaatgactccgctaactctgtggggtgcgcagtgctttccccacatagaataaattagcattccgactgtgataataataccaagtataaacgccataatactcaatactttccatgtacgagtgggactggtagacttactaaagtcaataaaggcgaagatacacgaaagaatcaaaagaatgattccagcgattagcacgccggaaaaataatttccaatcataagcatcatgtccatttaactaataaaaattttaaatcgccgaatgaacaaagtggaatataaaccatataaaaacaatagtttgtactgcaaaaataatatctatttttgttttcgaagatatggtaaaattaaatagtagtacacagcatgttataactaacagcagcaacggctcgtaattacttatcatttactagacgaaaaggtggtgggatattttcttgctcaaataatacgaatatatcacccatccattttatgcgatgtttatatactctaatctttaatagatctatagacgacgggtttaccaacaatatagattttatcgattcatctaatttaaacccttccttaaacgtgaatgatctattatctggcataacgatgactctacctgatgaatcggacaatgtactgggccatgtagaataaattatcaacgaattatcgtctacgaacatttatatcatttgttttaattttaggacgcgaataaatggatataaaatagaaaataacagatattacaaccaatgttatggccgcgcccaaccaggtaggcagttttattttatcttttactacaggttctcctggatgtacgtcaccaacggcggacgtagttctagtacaattagacgtaagttctgcttgggaattttttaacgctaaagagttaacgttaatcgtgcacccaacgtatttacatctagttctttgaacatcttgattataatataaccattttctatctctagattcgtcggtgcactcatgtaaccaacataccctaggtcctaaatatttatctccggaattagattttggataattcgcgcaccaacaatttctatttcctttatgatcgttacaaaagacgtataatgccgtatccccaaaagtaaaataatcaggacgaataattctaataaactcagaacaatatctcgcatccatatgtttggagcaaatatcggaataagtagacatagccggtttccgttttgcacgtaaccattctaaacaattggggtttccaggatcgtttctacaaaatccagtcatgaaatcatcacaatgttctgtcttgtaattattattaaatatttttggacagtgtttggtatttgtcttagaacaacattttgccacgctatcactatcgcccaggagataatccttttttataaaatgacatcgttgcccggatgctatataatcagtggcgtgttttaaatccttaatatattcaggagttacctcgttctgataatagattaatgatccaggacgaaatttgaaagaactacatggttctccatgaattaatacatattgtttagcaaattcaggaactataaaactactacaatgatctatcgacataccatctatcaaacaaaacttgggtttaatttctcccggagatgtttcataatagtacgtataactttcttctgcaaacttaacagctctattatattcaggataattaaaacctaattccatatatttgtctcgtatatctgctattcctggtgctattttaattctattaagagtaacggctgcccccattcttaataatcgtcagtatttaaactgttaaatgttggtatatcaacatctaccttatttcccgcagtataaggtttgttgcaggtatactgttcaggaatggttacatttatacttcttctatagtcctgtctttcgatgttcatcacatatgcaaagaacagaataaacaaaataatgtaagaaataatattaaatatctgtgaattcgtaaatacattgattgccataataattacagcagctacaatacatacaatagacattcccacagtgttgccattacctccacgatacatttgagttactaagcaataggtaataactaagctagtaagaggcaatagaaaagatgagataaatatcatcaatatagagattagaggagggctatatagagccaagacgaacaaaatcaaaccgagtaacgttctaacatcattatttttgaagattcccaaataatcattcattcctccataatcgttttgcattatacctccatctttaggcataaacgattgctgctgttcctctgtaaataaatctttatcaagcactccagcacccgcagagaagtcgtcaagcatattgtaatatcttaaataactcatttatatattaaaaaatgtcactattaaagatggagtataatctttatgccgaactaaaaaaaatgacttgtggtcaacccctaagtctttttaacgaagacggggatttcgtagaagttgaaccgggatcatcctttaagtttctgatacctaagggattttacgcctctccttccgtaaagacgagtctagtattcgagacattaacaacgaccgataataaaatcactagtatcaatccaacaaatgcgccaaagttatatcctcttcaacgcaaagtcgtatctgaagtagtttctaatatgaggaaaatgatcgaatcaaaacgtcctctatacattactcttcacttggcgtgtggatttggtaagactattaccacgtgttatcttatggctacacacggtagaaaaaccgtcatttgcgtacccaataaaatgttaatacatcaatggaagacacaggtagaggcagtcggattggaacataagatatctatagatggagtaagtagtctattaaaggaactaaagactcaaagtccggatgtattaatagtagtcagtagacatctgacaaacgatgccttttgtaaatatatcaataagcattatgatttgttcatcttggatgaatcacatacgtataatctgatgaacaatacagcagttacaagatttttagcgtattatcctccgatgatgtgttattttttaactgctacacctagaccagctaaccgaatttattgtaacagtattattaatattgccaagttatccgatctaaaaaaaactatctatgcggtagatagtttttttgagccatattccacagacaatattagacatatggtaaaacgactagatggaccatctaataaatatcatatatatactgagaagttattatctgtagacgagcctagaaatcaacttattcttgataccctggtagaagaattcaagtcaggaactattaatcgaattttagttattactaaactacgtgaacatatggtattcttctacaaacgattattagattttttcggatcagaggttgtatttataggagacgcccaaaatagacgtactccagatatggtcaaatcaatcaaggaactaaatagatttatattcgtatccaccttattttattccggtactggtttagatattcctagtttggattcgttgttcatttgctcggcagtaatcaacaatatgcaaatagagcaattactagggagggtatgtcgagaaacagaactattagataggacggtatatgtatttcctaacacatccatcaaagaaataaagtacatgataggaaatttcatgcaacgaattattagtctgtctgtagataaactaggatttaaacaaaaaagttatcggaaacatcaagaatccgatcccacttctgtatgtacaacatcctccagagaagaacgtgtattaaatagaatatttaactcgcaaaatcgttaagaagtttaagcgacgatccgcatgctgcgcaggccagtgtattacccctcatagtattaatataatccaatgatacttttgtgatgtcggaaatcttaaccaatttagactgacaggcagaacacgtcatgcaatcatcatcgtcatcgataactgtagtcttgggcttctttttgcggctcttcattccggaacgcacattggtgctatccatttaggtagtaaaaaataagtcagaatatgccctatagcacgatcgtgcaaaacctggtatatcgtctctatctttatcacaatatagtgtatcgacatttttattattattgacctcgtttatcttggaacatggaatgggaacatttttgttatcaacggccatctttgccttaattccagatgttgtaaaattataactaaacagtctatcatcgacacaaatgaaattcttgtttagacgtttgtagtttacgtatgcggctcgttcgcgtctcattttttcagatattgcaggtactataatattaaaaataagaatgaaataacataggattaaaaataaagttatcatgacttctagcgctgatttaactaacttaaaagaattacttagtctgtacaaaagtttgaaattttcagattctgcggctatagaaaagtataattctttggtagaatggggaacatctacttactggaaaataggcgtgcaaaaggtagctaatgtcgagacgtcaatatctgattattatgatgaggtaaaaaataaaccgtttaatattgatccgggatattacattttcttaccggtatattttggaagcgtctttatttattcgaagggtaaaaatatggtagaacttggatctggaaactcttttcaaataccagatgatatgcgaagtgcgtgtaacaaagtattagacagcgataacggaatagactttctgagatttgttttgttaaacaatagatggataatggaagatgctatatcaaaatatcagtctccagttaatatatttaaactagctagtgagtacggattaaacatacccaaatatttagaaattgaaatagaggaagacacattatttgacgacgagttatactctattatagaacgctctttcgatgataaatttccaaaaatatccatatcgtatattaagttgggagaacttagacggcaagttgtagactttttcaaattctcgttcatgtatattgagtccatcaaggtagatcgtataggagataatatttttattcctagcgttataacaaaatcaggaaaaaagatattagtaaaagatgtagaccatttaatacgatccaaggttagagaacatacatttgtaaaagtaaaaaagaaaaacacattttccattttatacgactatgatggaaacggaacagaaactagaggagaagtaataaaacgaattatagacactataggacgagactattatgttaacggaaagtatttctctaaggttggtagtgcaggcttaaagcaattgactaataaattagatattaatgagtgcgcaactgtcgatgagttagttgatgagattaataaatccggaactgtaaaacgaaaaataaaaaaccaatcagcatttgatttaagcagagaatgtttgggatatccagaagcggattttataacgttagttaataacatgcggttcaaaatagaaaattgtaaggttgtaaatttcaatattgaaaatactaattgtttaaataacccgagtattgaaactatatatggaaactttaaccagttcgtctcaatctttaatatcgtcaccgatgtcaaaaaaagattattcgagtgaaataatatgcgcctttgatataggtgcaaaaaatcctgccagaactgttttagaagtcaaggataactccgttagggtattggatatatcaaaattagactggagttctgattgggaaaggcgcatagctaaagatttgtcacaatatgaatacactacagttcttctagaacgtcagcctagaaggtcgccgtacgtcaaatttatctattttattaaaggctttttatatcatacatcggctgccaaagttatttgcgtctcgcctgtcatgtctggtaattcatatagagatcgaaaaaagagatcggtcgaagcatttcttgattggatggacacattcggattgcgagactccgttccggatagacgcaaattagacgatgtagcggatagtttcaatttggctatgagatacgtattagataaatggaatactaattatacaccttataataggtgtaaatctagaaattacataaaaaaaatgtaataacgttagtaacgccattatggataatctatttacctttctacatgaaatagaagatagatatgccagaactatttttaactttcatctaataagttgcgatgaaataggagatatatatggtcttatgaaagaacgcatttcctcagaggatatgtttgataatatagtgtataataaagatatacatcatgccattaagaaactagtgtattgcgacatccaacttactaaacacattattaatcagaatacgtatccggtatttaacgattcttcacaagtgaaatgttgtcattatttcgacataaactcagataatagcaatattagctctcgtacagtagagatatttgagagggaaaagtcatctcttgtatcatatattaaaactaccaataagaagagaaaggtcaattacggcgaaataaagaaaactgttcatggaggcactaatgcaaattacttttccggtaaaaagtctgacgagtatctgagtactacagttagatccaacattaatcaaccttggatcaaaaccatctctaagaggatgagagttgatatcattaatcactctatagtaacgcgtggaaaaagctctatattacaaactatagaaattatttttactaatagaacatgtgtgaaaatattcaaggattctactatgcacattattctatccaaggacaaggatgaaaaggggtgtatacacatgattgacaaattattctatgtctattataatttatttctgttgttcgaggatatcatccaaaacgagtactttaaagaagtagctaatgttgtaaaccacgtacttacggctacggcattagatgagaaattattcctaattaagaaaatggctgaacacgatgtttatggagttagcaatttcaaaatagggatgtttaacctgacatttattaagtcgttggatcataccgttttcccctctctgttagatgaggatagcaaaataaagttttttaaggggaaaaagctcaatattgtagcattacgatctctggaggattgtataaattacgtgactaaatccgagaatatgatagaaatgatgaaggaaagatcgactattttaaatagcatagatatagaaacggaatcggtagatcgtctaaaagaattgcttctaaaatgaaaaaaaacactgattcagaaatggatcaacgactcggatataagtttttggtgcctgatcctaaagccggagttttttatagaccgttacatttccaatatgtatcgtattctaattttatattgcatcgattgcatgaaatcttgaccgtcaagcggccactcttatcgtttaagaataatacagaacgaattatgatagaaattagcaatgttaaagtgactcctccagattactcacctataatcgcgagtattaaaggtaagagttatgacgcattagccacgttcactgtaaatatctttaaagaggtaatgaccaaagagggtatatccatcactaaaataagtagttatgagggaaaagattctcatttgataaaaattccgctactaataggatacgggaataaaaatccacttgatacagccaagtatcttgttcctaatgtcataggtggagtctttatcaataaacaatctgtcgaaaaagtaggaattaatctagtagaaaagattacaacatggccaaaatttagggttgttaagccaaactcattcactttctcgttttcctccgtatcccctcctaatgtattaccgacaagatatcgccattacaagatatctctggatatatcacaattggaagcgtcgaatatatcatcgacaaagacatttataacggtcaatattgttttgctgtctcaatatttatctagagtgagtctagaattcattagacgtagcttatcatacgatatgcctccagaagttgtctatctagtaaacgcgataatagatagtgctaaacgaattactgaatctattactgactttaatattgatacatacattaatgacctggtggaagctgaacacattaaacaaaaatctcagttaacgatcaacgagttcaaatatgaaatgctgcataactttttacctcatatgaactatacacccgatcaactaaagggattttatatgatatctttactaagaaagtttctctactgtatctaccacacttctagatatccagatagagattcgatggtttgtcatcgtatactaacatacggcaaatattttgagacgttggcacatgatgaattagagaattacataggcaacatccgaaacgatatcatgaacaatcacaagaacagaggcacttacgcggtaaacattcatgtactaacaactcctggacttaatcatgcattttctagtctattgagtggaaagttcaaaaagtcagacggtagttatcgaacacatcctcactattcatggatgcagaatatttctattcctaggagtgttggattttatccggatcaagtaaagatttcaaagatgttttctgtcagaaaataccatccaagtcaatatctttacttttgttcatcagacgttccggaaagaggtcctcaggtaggtttagtatctcaattgtctgtcttgagttccattacaaatatactaacgtctgagtatttggatttggaaaagaaaatttgtgagtatatcagatcatattataaagatgatataagttactttgaaacaggatttccaatcactatagaaaatgctctagtcgcatctcttaatccaaatatgatatgtgattttgtaactgactttagacgtagaaaacggatgggattcttcggtaacttggaggtaggtattactttagttagggatcacatgaatgaaattcgcattaatattggagcgggaagattagtcagaccattcttggttgtggataacggagagctcatgatggatgtgtgtccggagttagaaagcagattagacgacatgacattctctgacattcagaaagagtttccgcatgtcatcgaaatggtagatatagaacaatttacttttagtaacgtatgtgaatcggttcaaaaatttagaatgatgtcaaaggatgaaagaaagcaatacgatttatgtgactttcctgccgaatttagagatggatatgtggcatcttcattagtgggaatcaatcacaattctggacccagagctattcttggatgtgctcaagctaaacaagctatctcttgtctgagctcggatatacgaaataaaatagacaatggaattcatttgatgtatccagagaggccaatcgtgattagtaaggctttagaaacttcaaagattgcggctaattgcttcggccaacatgttactatagcattaatgtcgtacaaaggtatcaatcaagaggatggaattatcatcaaaaaacaatttattcagagaggcggtctcgatattgttacagccaagaaacatcaagtagaaattccattggaaaactttaataacaaagaaagagataggtctaacgcctattcaaaattagaaagtaatggattagttagactgaatgctttcttggaatccggagacgctatggcacgaaatatctcatcaagaactcttgaagatgattttgctagagataatcagattagcttcgatgtttccgagaaatataccgatatgtacaaatctcgcgttgaacgagtacaagtagaacttactgacaaagttaaggtacgagtattaaccatgaaagaaagaagacccattctaggagacaaatttaccactagaacgagtcaaaagggaacagtcgcgtatgtcgcggatgaaacggaacttccatacgacgaaaatggtatcacaccagatgtcattattaattctacatccatcttctctagaaaaactatatctatgttgatagaggttattttaacagccgcatattctgctaagccgtacaacaataagggagaaaaccgacctgtctgttttcctagtagtaacgaaacatccatcgatacatatatgcaattcgctaaacaatgttatgagcattcaaatccgaaattgtctgatgaagaattatcggataaaatcttttgtgaaaagattctctatgatcctgaaacggataagccttatgcatccaaagtattttttggaccaatttattacttgcgtctgagacatttaactcaggacaaggcaaccgttagatgtagaggtaaaaagacgaagctcattagacaggcgaatgagggacgaaaacgtggaggaggtatcaagttcggagaaatggagagagactgtttaatagcgcatggtgcagccaatactattacagaagttttgaaagattcggaagaagattatcaagatgtgtatgtttgtgaaaattgtggagacatagcagcacaaatcaagggtattaatacatgtcttagatgttcaaaacttaatctctctcctctcttaacaaaaattgataccacacacgtatctaaagtatttcttactcaaatgaacgccagaggcgtaaaagtcaaattagatttcgaacgaagacctccttcgttttataaaccattagataaagttgatctcaaaccgtcttttctggtctaatattgtttagtagatacttatcaacatcatcaagattatcaagattatcaagattatcaagataagctaattcactaaacacattatcgatttcggtatcgttactcgcagaataaagttcgttatgatcctgatattcggaaatctgtggagtttcaggttttggtggatgtgtaacagctacttgagataccgaagtctgatattcagaaagctgtggatgttctggttcggcatccaccgatggtgttacaccactactaattggttcagtaacgtctgtggacgatggaggcaccacttctacaggttctggttctttatcctcagtcatcaacggagctacttcaatgcgaggaaatgtataatttggtaatggtttctcatgtggatctgaagaagaggtaagatatctactagaaagataccgatcacgttctagttctcttttgtagaacttaactttttctttctcagcatctagttgatattccaacctcttcacgttactacgttcagatttcaattcacgttcgcatgggttacctccgcagtttttacgagcgatttcacgttcagccttcatgcgtctctccctctctctatcgagtttatcagagcagtctttctgaaggcgatcgaactccataaatttctccaacgctttgattgtttccatagatttccgaagttcagcttttaggactgtgattctttttctttcgaattcacagctggatgtacaaccgtttccattaccgccatctctaagtttcttttctagatcggcaacatttcatccccatgccttttacattcctcgagtctactgtcgtcgaaatatcgttccagctccttttcgacatcaataactttagcacgttgtctctcaagctctcttttgtagttatctgattccctggcacgtttaagatcttcatgcaattgagtcagctcttaacacaatctcttgcttcttcgtcatagtacgcgcaatcactgtgagatccattgttaccacgtctacactcggcgagctcgcgtttaagagattcaatttcccgtttgtattggtccatgtttccattgctaccaccattagatttacaggctgctagttgtcgttcgagatcagaaatacgggttttcttggaattgatttcgtcgatgtacttggcatcgaaacacttattaagttctttttccaattctacgattttatttctttcgcgagtcaattccctcctgtagtaactatctgttttgtcagattcacgctctctacgtagactttcttgcaagttactaatttgttccctagcacgtccgagtttagttttatatgctgaatagagttctgattcatcctttgagcagatctctagcgatcgtttaagattcctgattctagtctttagcctatttacctcctcagaagatgttccgttaccgttgcgtttacactcgttaagctgtctatcaagatccatgattctatctctaagacgttgcatctctctttccatatcagcattgctttcattattacgtctgcagtcactcaactgtctttcaatatctgagattctatctctaagacgtcgcatctctctctgtttcggcattggtttcattattacgtctacagtcgttcaactgtctttcaagatctgatattctagattggagtctgctaatctctgtagcattttcacggcattcactcagttgtctttcaagatctgaaattttagattggagtctgctaatctctgtaagatttcctcctccgctctcgatgcagtcggtcaacttattctctagttctctaatacgcgaacgcagtgcatcaacttcttgcgtgtcttcctggttgcgtgtacattcatcgagtctagattcgagatctctaacgcgtcgtcgttcttcctcaagttctctgcgtactacagaaagcgtgtccctatcttgttgatatttagcaatttctgattctagagtactgattttgcttacgtagttactaatatttgtcttggccttatcaagatcctccttgtatttgtcgcattccttgatatccctacgaagtctggacagttcccattcgacattacgacgtttatcgatttcagctcggagatcgtcatcgcgttgttttagccacatacgactgagttcaagttctcgttgacaagatccatctacttttccattcctaatagtatccagttccttttctagttctgaacgcatttctcgttccctatcaagcgattctctcaattctcggatagtcttcttatcaatttctaataaatctgaaccatcatctgtcccattttgaatatccctgtgttctttgatctcttttgtaagtcggtcgattctttcggttttataaacagaatccctttccaaagtcctaatcttactgagtttatcactaagttctgcattcaattcggtgagttttctcttggcttcttccaactctgttttaaactctccactatttccgcattcttcctcgcatttatctaaccattcaattagtttattaataactagttggtaatcagcgattcctatagccgttcttgtaattgtgggaacataattaggatcttctaatggattgtatggcttgatagcatcatctttatcattattagggggatggacaaccttaattggttggtcctcatctcctccagtagcgtgtggttcttcaatagccgtgttagtaataggcttaggcaaatgcttgtcgtacgcgggcacttcctcatccatcaagtatttataatcgggttctacgtctgaatattcttttctaagagacgcaacttctggagttagtagaagaactctgtttctatatctatcaacgctggaatcaatactcaagttaaggatagcgaatacctcatcgtcatcatccgtatcctctgaaacgccatcatatgacatttcatgaagtctaacgtattgataaacagaatcagatttagtattaaacagatccttaacctttttagtaaatgcatatgtatattttagatctccagatttcataatatggtcgcatgccttaaatgtcagtgcttccataatatagtctggaacactaattggtgatgaaaaagataccggaccatatgctacgttgataaataactctgagccactaactagataatgattaatgttaaggaagaggaaatattcagtgtataggtatgtcttggcgtcatatcttgtactaaacacgctaaacagtttgttaatgtgatcaatttccaatagattaattagagcagcaggaataccaacaaacatattaccacatccgtattttctatgaatatcacatatcatgttaaaaaatcttgatagaagagcgaatatctcgtctgacttaatgagtcgtagttcagcagcaacataagtcataactgtaaatagaacatactttcctgtagtgttgattctagactccacatcaacaccattattaaaaatagttttatatacatctttaatctgctctccgttaatcgtcgaacgttctagtatacggaaacactttgatttcttatctgtagttaatgacttagtgatatcacgaagaatattacgaattacatttcttgtttttcttgagagacctgattcagaactcaactcatcgttccatagtttttttacctcagtggcgaaatctttggagtgcttggtacatttttcaataaggttcgtgacctccatttattataaaaaaattttattcaaaacttaactacaatcgggtaattataaaatcgtagatctcccatgtggtggaatactaccatctatcgcatgtggatggacagtaggtaatggccatgggaacagtaatgtttgcatatttatctttcttgccagtattactgcatattgtcccaatgtttcgatgtgatgttctaacctatcaactgccgctgtatcacaacaatagtgtccgatgaaattaagattatgatccaatgtgtttaatatatgattatcaagtcttatacgatccgcgtcttttttgacaggatcaggttcttctacaggaagaagtttcggcctcttatgatattcatgtctgggaaacggtggtctagggtgaggctccggtatcggagtgggttttggattataatcatcatcgtctatgacatcatcttcgacttcgatatttattttgctatcttgatgatgtcctgtatcagttgcattttcagcactcgactgaatattagcgcattcattgtttattattaccatatttctaaacccaaaatgtatatgttgaacatcagtactatcgttgatgagtcttatagcatgaattcgcttatcgttatcgggtttagcttctgtcaccttagcaattccttttttattaaactctacataatcatatccatttctattgtttgttctaatataaacgagtatagcatcattgctaaatttttcaatagtatcgaaaacagaatatcctaaaccatataatatatattcaggaacactcaaactaaatgtccaggattctcctaaatacgtaaactttaatagtgcgaaatcattcaaaaatctaccacttatagatagatagtacataaatgcgtatagtagtctacctatctctttattatgaaaaccggcattacgatcatatatgtcgtgatatacctgtgatccgtttacgttaaaccataaatacatgggtgatcctataaacatgaatttatttctaattctcagagctatagttaattgaccgtgtaatatttgcttacatgcatacttgatacgctcattaataagatttttatcattgctcgttatctcagaatcgtatatataaggagtaccatcgtgattcttaccagatattatacaaaatactatatataaaatatattgaccaacgttagtaatcatataaatgtttaacgttttaaattttgtattcaatgatccattatcatacgctagcatggtcttatgatattcattctttaaaatataatattgtgttagccattgcattggggctcctaatggagattttttattctcatccattttaggataggctttcataaagtccctaataacttcgtgaataatgtttctatgttttctactgatgcatgtatttgcttcgatttttttatcccatgtttcatctatcatagatttaaacgcagtaatgctcgcaacattaacatcttgaaccgttggtacaattccgttccataaatttataatgttcgccatttatataactcattttttgaatatacttttaattaacaaaagagttaagttactcatatggacgccgtccagtctgaacatcaatctttttagccagagatatcatagccgctcttagagtttcagcgtgattttccaacctaaatagaacttcatcgttgcgtttacaacacttttctatttgttcaaactttgttgttacattagtaatctttttttccaaattagttagccgttgtttgagagtttcctcattgtcgtcttcatcggctttaacaattgcttcgcgtttagcctctggctttttagcagcctttgtagaaaaaaattcagttgctggaattgcaagatcgtcatctccggggaaaagagttccgtccatttaaagtacagattttagaaactgacactctgcgttatttatatttggtacaacacatggattataaatattgatgttaataacatcagaaaatgtaaagtctatacattgttgcatcgtgttaaattttctaatggatctagtattattgggtccaacttctgcctgaaatccaaatatggaagcggatacaaaaccgtttcctggataaaccacacatctccacttttgctttacatcagaaattgtgtcattgacatcttgaactctcctatctaatgccggtgttccacctatagattttgaatattcgaatgctgcatgagtagcattaaattccttaatattgccataattttcatatattgagtaaccctggataaaaagtaaacacaccgcagccgtcgctaccacaataaaaaaaattgatagagagttcatttataatctattagaagctgacaaaatttttttacacgcatcagacaatgctttaataaatagttcaacatctacttttgtcatatcgaaccgatggtatgattctaacctagaattacatccgaaaaagttgactatgttcatagtcattaagtcattaacaaacaacattccagactctggattataagacgatactgtttcgtcacaattacctaccttaatcatgtgattatgaatattggctattagagcaccttctaagaaatctataatatctttgaaacacgatttaaaatcaaaccacgaatatacttctacgaagaaagttagtttacccataggagaaataactataaatggagatctaaatacaaaatccggatctatgatagttttaacattattatattctctattaaatacctccacatctaaaaatgttaattttgaaactatgtcttcgtttattaccgtacctgaactaaacgctataagctctattgtttgagaactctttaaacgatattcttgaaatacatgtaacaaagtttcctttaactcggtcggtttatctaccatagttacagaatttgtatccttatctataatataataatcaaaatcgtataaagttatataattatcgcgttcagattgtgatcttttcaaatagactaaaaaccccatttctctagtaagtatcttatgtatatgtttgtaaaatatcttcatggtgggaatatgctctaccgcagttagccattcctcattgacagcggtagatgtattagacaaaactattccaatgtttaacaagggccattttacgagattattaaatccttgtttgataaatgtagccaatgagggttcgagttcaacgacgattgaattctcttcccgcggatgctgcatgatgaacgacgggatgttgttcgattgatttggaattctttttcgactttttgtttatattaaatattttaaaatttatagctgatagcaattcatgtactacggataatgtagacgcgtattgcgcatcgatatctttattattagataaatttatcaataaatgtgagaagtttgcctcgttaaggtcttccatttaaatattatataaacatttgtgtttgtatcttattcgtcttttatggaatagttttttactagtaaagctgcaattacacactttgtccgtaaaacataaatataaacaccagcttttatcaatcgttccaaaaagtcgacggcggacatttttaacatggcatctattttaaatacacttaggtttttggaaaaaacatcattttataattgtaacgattcaataactaaagaaaagattaagattaaacataagggaatgtcatttgtattttataagccaaagcattctaccgttgttaaatacttgtctggaggaggtatatatcatgatgatttggttgtattggggaaggtaacaattaatgatctaaagatgatgctattttacatggatttatcatatcatggagtgacaagtagtggagcaatttacaaattgggatcgtctatcgatagactttctctaaataggactattgttacaaaagttaataattatgatgatacattttttgacgacgatgattgatcgctattgcacaattttgtttttttactttctaatatagcgtttagattctttttcatgtgcgaatattgatttactaaaatatcgatgtttaacttttgttctatgacgtccttatcagcggtatcggtacatatacgtaattcaccttcacaaaatacggagtcttcgataataatagccaatcgattattggatctagcggtctgtatcatattcaacatgtttaatatatcctttcgtttcccctttacaggcatcgatcgtagcatattttccgcgtctgagatggaaatgttaaaactacaaaaatgcgtaatgttagcccgtcctaatattggtacgtgtctataagtttggcatagtagaataatagacgtgtttaaatgccttccaaagtttaagaattctattagagtattgcattttgatagtttatcgcctacatcatcaaaaataagtaaaaagtgtgctgattttttatgattttgtgcgacagcaatacatttttctatgttacttttagttcgtatcagattatattctagagattcctgactactaacgaaattaatatgatttggccaaatgtatccatcataatctggattataaacgggtgtaaacaagaatatatgtttatattttttaactagtgtagaaaacagagatagtaaatagatagtttttccagatccagatcctcccgttaaaaccattctaaacggcatttttaataaattttctcttgaaaattgtttttcttggaaacaattcataattatatttacagttactaaattaatttgataataaatcaaaatatggaaaactaaggtcgttagtagggaggagaacaaagaaggcatatcgtgatataaataacatttattatcatgatgacaccagaaaacgacgaagagcagacatctgtgttctccgctactgtttacggagacaaaattcagggaaagaataaacgcaaacgcgtgattggtctatgtattagaatatctatggttatttcactactatctatgattaccatgtccgcgtttctcatagtgcgcctaaatcaatgcatgtctgctaacgaggctgctattactgacgccgctgttgccgttgctgctgcatcatctactcatagaaaggttgcgtctagcactacgcaatatgatcacaaagaaagctgtaatggtttatattaccagggttcttgttatatattacattcagactaccagttattctcggatgctaaagcaaattgcactgcggaatcatcaacactacccaataaatccgatgtcttgattacctggctcattgattatgttgaggatacatggggatctgatggtaatccaattacaaaaactacatccgattatcaagattctgatatatcacaagaagttagaaagtatttttgtgttaaaacaatgaactaatatttatttttgtacattaataaatgaaatcgcttaatagacaaactgtaagtaggtttaagaagttgtcggtgccggccgctataatgatgatactctcaaccattattagtggcataggaacatttctgcattacaaagaagaactgatgcctagtgcttgcgccaatggatggatacaatacgataaacattgttatctagataccaacattaaaatgtctacagataatgcggtttatcagtgtcgtaaattacgagctagattgcctagacctgatactagacatctgagagtattgtttagtattttttataaagattattgggtaagtttaaaaaagaccaataataaatggttagatattaataatgataaagatatagatattagtaaattaacaaattttaaacaactaaacagtacgacggatgctgaagcgtgttatatatacaagtctggaaaactggttgaaacagtatgtaaaagtactcaatctgtactatgtgttaaaaaattctacaagtgacaacaaaaaatgaattaataataagtcgttaacgtacgccgccatggacgccgcgtttgttattactccaatgggtgttgactataacagatacattgtatgatgatctcgatatctcaatcatggactttataggaccatacattataggtaacataaaaactgtccaaatagatgtacgggatataaaatattccgacatgcaaaaatgctactttagctataagggtaaaatagttcctcaggattctaatgatttggctagattcaacatttatagcatttgtgccgcatacagatcaaaaaataccatcatcatagcatgcgactatgatatcatgttagatatagaagataaacatcagccattttatctattcccatctattgatgtttttaacgctacaatcatagaagcgtataacctgtatacagctggagattatcatctaatcatcaatccttcagataatctgaaaatgaaattgtcgtttaattcttcattctgcatatcagacggcaatggatggatcataattgatgggaaatgcaatagtaattttttatcataaaagttgtaaagtaaataataaaacaataaatattgaactagtagtacgtatattgagcaatcagaaatgatgctggtacctcttatcacggtgaccgtagttgcgggaacaatattagtatgttatatattatatatttgtaggaaaaagatacgtactgtctataatgacaataaaattatcatgacaaaattaaaaaagataaagagttctaattccagcaaatctagtaaatcaactgatagcgaatcagactgggaggatcactgtagtgctatggaacaaaacaatgacgtagataatatttctaggaatgagatattggacgatgatagcttcgctggtagtttaatatgggataacgaatccaatgttatggcgcctagcacagaacacatttacgatagtgttgctggaagcacgctgctaataaataatgatcgtaatgaacagactatttatcagaacactacagtagtaattaatgaaacggagactgttaaagtacttaatgaagataccaaacagaatcctaactattcatccaatcctttcgtaaattataataaaaccagtatttgtagcaagtcaaatccgtttattacagaacttaacaataaatttagtgagaataatccgtttagacgagcacatagcgatgattatcttaataagcaagaacaagatcatgaacacgatgatatagaatcatcggtcgtatcattggtgtgattagtttcctttttataaaattgaagtaatatttagtattattgctgccgtcacgttgtacaaatggagatattccctgtattcggcatttctaaaattagcaattttattgctaataatgactgtagatattatatagatacagaacatcaaaaaattatatctgatgagatcaatagacagatggatgaaacggtacttcttaccaacatcttaagcgtagaagttgtaaatgacaatgagatgtaccatcttattcctcatagattatcgacgattatactctgtattagttctgtcggaggatgtgttatctctatagataatgacgtcaatggcaaaaatattctaacctttcccattgatcatgctgtaatcatatccccactgagtaaatgtgtcgtagttagcaagggccctacaaccatactggttgctaaagcggatatacccagcaaacgattggtaacatcgtttacaaacgacatactgtatgtaaacaatctatcactgattaattatttgccgttgtctgtattcattattagacgagtcaccgactatttggatagacacatatgcgatcagatatttgctaataataagtggtattcccttataaccatcgacgataagcaatatcctattccatcaaattgtataggtatgtcttctgccaagtacataaattctagcatcgagcaagatactttaatacatgtttgtaacctcgagcatccattcgacttagtatacaaaaaaatgcagtcgtacaattctgtacctatcaaggaacaaatattgtacggtagaattgataatataaatatgagcattagtatttctgtggattaatagatttctagtatggggatcattaatcatctctaatctctaaatacctcataaaacgaaaaaaaagctattatcaaatactgtacggaatagattcattctcttctctttttatgaaactctgttgtatatctactgataaaactggaagcaaaaaatctgataaaaagaataagatcaagatcaaggattatatggaacacgattattataaaataacaatagttcctggttcctcttccacgtctactagctcgtggtattatacacatgcctagtaatagtctctttgcgttgatggaaagcagactagaaataacaggctaaaatgttcagacaccataatagttcccaacccagataataacagagtaccatcaacacattcctttaaactcaatcccaaacccaaaaccgttaaaatgtatccggccaattgatagtagataatgaggtgtacagcgcatgataatttacacagtaaccaaaatgaaaatactttagtaattataagaaatatagatggtaacgtcatcatcaacaatccaataatatgccggagagtaaacattgacggataaaacaaaaatgctccgcataactctatcatggcaataacacaaccaaatacttgtaagattcctaaattagtagaaaatacaacggatatcgatgtataagtgatctcgagaaataataagaataaagtaatgcccgtaaagataaacatcaacattgtttggtaatcattaaaccaattagtatgacgttgaactaatttcacagtaaattttattccagtattatccccgcatgtataagtacctggtaagatatctttatattccataatcaatgagacatcactatctgataacgaatgaagtctagcactagtatgccatttacttaatattgtcgtcttggaagttttattataagttaaaatatcatggttatccaatttccatctaatatactttgtcggattatctatagtacacggaataatgatggtatcattacatgctgtatactctatggtctttgtagttgttataacaaccaacgtatagaggtatatcaacgatattctaactcttgacattttttatttatttaaaatgatacctttgttatttattttattctattttgctaacggtattgaatggcataagtttgaaacgagtgaagaaataatttctacttacttattagacgacgtattatacacgggtgttaatggggcggtatacacattttcaaataataaactaaacaaaactggtttaactaataataattatataacaacatctataaaagtagaggatgcggataaggatacattagtatgcggaaccaataacggaaatcccaaatgttggaaaatagacggttcagacgacccaaaacatagaggtagaggatacgctccttatcaaaatagcaaagtaacgataatcagtcacaacggatgtgtactatctgacataaacatatcaaaagaaggaattaaacgatggagaagatttgacggaccatgtggttatgatttattcacggcggataacgtaattccaaaagatggtttacgaggagcattcgtcgataaagacggtacttatgacaaagtttacattcttttcactgatactatcggctcaaagagaattgttaaaattccgtatatagcacaaatgtgcctaaacgacgaaggtggtccatcatcgttgtctagtcatagatggtcgacgtttctcaaagtcgaattagaatgtgatatcgacggaagaagttatagataaattattcattctaaaactataaaaacagataatgatacgatactatatgtattcttcgatagtccgcattatgtacctattctatgaataccattaaacaatctttttctacgtcaaaattggaaggatatacaaagcaattgccgtctccagctcctggtatatgtctaccagctggaaaagttgttccacataccacgtttgaagtcatagaaaaatataatgtactagatgatattataaagcctttatctaaccaacctatcttcgaaggaccgtctggtgttaaatggttcgatataaaggagaaggaaaatgaacatcgggaatatagaatatacttcataaaagaaaattctatatattcgttcgatacaaaatctaaacaaactcgtagctcgcaagtcgatgcgcgactattttcagtaatggtaacttcgaaaccgttatttatagcagatatagggataggagtaggaatgccacaaatgaaaaaaatacttaaaatgtaatcttaatcgagtacaccacacgacaatgaacaaacataagacagattatgctggttatgcttgctgcgtaatatgcggtctaattgttggaattatttttacagcgacactattaaaagttgtagaacgtaaattagttcatacaccatcaatagataaaacgataaaagatgcatatattagagaagattgtcctactgactggataagctataataataaatgtatccatttatctactgatcgaaaaaacctgggaggaaggacgtaatgcatgcaaagctctaaatccaaattcggatctaattaagatagagactccaaacgagttaagttttttaagaagccttagacgaggctattgggtaggagaatccgaaatattaaaccagacaaccccatataattttatagctaaaaatgccacgaagaatggaactaaaaaacggaaatatatttgtagtacaacgaatactcccaaactgcattcgtgttacactatataacaattacactacatttttatcataacactacttcggttagatgttttagaaaaaaataaatatcgccgtaccgttcttgtttttataaaaataacaattaacaattatcaaattttttctttaatattttacgtggttgaccattcttggtggtaaaataatctcttagtgttggaatggaatgctgtttaatgtttccgcactcatcgtatattttgacgtatgcagtcacatcgtttacgcaatagtcagactgtagttctatcatgcttcctacatcagaaggaggaacagttttaaagtctcttggttttaatctattgccattagttttcatgaaatcctttgttttatccacttcacattttaaataaatgtccactatacattcttctgttaattttactagatcgtcatgggtcatagaatttataggttccgtagtccatggatccaaactagcaaacttcgcgtatacggtatcgcgattagtgtatacaccaactgtatgaaaattaagaaaacagtttaataaatcaacagaaatatttaatcctccgtttgatacagatgcgccatatttatggatttcggattcacacgttgtttgtctgaggtgttcgtctagtgttgcttctacgtaaacttcgattcccatatattctttattgtcagaatcgcataccgatttatcatcatacactgtttgaaaactaaatggtatacacatcaaaataataaataataacgagtacattctgcaatattgttatcgtaattggaaaattagtgttcgagtgagtcggattatgtgagtactggattgtatattttattttatattttgtaataagaataaaatgctaatgtcaagtttattccaatagatgtcttattaaaaaacatatataataaataacaatggctgaatggcataaaattatcgaggatatctcaaaaaataataagttcgaggatgccgccatcgttgattacaagactacaaagaatgttctagctgctattcctaacagaacatttgccaagattaatccgggtgaaattattcctctcatcactaatcgtaatattctaaaacctcttattggtcagaaatattgtattgtatatactaactctctaatggatgagaacacgtatgctatggagttgcttactgggtacgcccctgtatctccgatcgttatagcgagaactcataccgcacttatatttttgatgggtaagccaacaacatccagacgtgatgtgtatagaacgtgtagagatcacgctacccgtgtacgcgcaactggtaattaaaataaaaagtaatattcatatgtagtgtcaattttaaatgatgatgatgaaatggataatatccatattgacgatgtcaataatgccggtattggcatacagctcatcgatttttagatttcattcagaggatgtggaattatgttatgggcatttgtattttgataggatctataatgtagtaaatataaaatataatccgcatattccatatagatataattttattaatcgcacgttaaccgtagatgaactagacgataatgtcttttttacacatggttattttttaaaacacaaatatggttcacttaatcctagtttgattgtctcattatcaggaaacttaaaatataatgatatacaatgctcagtaaatgtatcgtgtctcattaaaaatttggcaacgagtacatctactatattaacatctaaacataagacttattctctacatcggtccacgtgtattactataataggatacgattctattatatggtataaagatataaatgacaagtataatgacatctatgattttactgcaatatgtatgctaatagcgtctacattgatagtgaccatatacgtgtttaaaaaaataaaaatgaactcttaattatgctatgctattagaaatggataaaatcaaaattacggttgattcaaaaattggtaatgttgttaccatatcgtataacttggaaaagataactattgatgttacacctaaaaagaaaaaagaaaaggatgtattattagcgcaatcagttgctgtcgaagaggcaaaagatgtcaaggtagaagaaaaaaatattatcgatattgaagatgacgatgatatggatgtagaaagcgcataatacgatctataaaaataagtatataataaatactttttatttacggtactcttgtagtggtgataccctactcaattatttttttaaaaaaatacttattctgattcttctagccatttccgtgttcgttcgaatgccacatcgacgttaaagataggggagtagttgaaatctagttctgcattgttggtacgcacctcaaatgtagtgttggatatcttcaacgtatagttgttgagtagtgatggttttctaaatagaattctcttcatatcattcttgcacgcgtacatttttagcatccatcttggaattctagatccttgttctattcccaatggtttcatcaatagaagattaaacatatcgtacgaacacgatggagagtaatcgtagcaaaagtaagcatttcctttaatcttagatcccggatactggatatattttgcagccaacacgtgcatccatgcagcatttcctacatatacccggctatgcaccgcgtcatcatcgactgtacgatacataatgttaccgtgttgcttacattgctcgtaaaagactttcgtcaatttgtctccttctccgtaaattccagtgggtcttaggcaacaagtatacaattttgctccattcatgattacggaattattggctttcataaccagttgctcggccatacgtttactttttgcgtatacatgtcctggtgatatatcataaagggtatgctcatggccgatgaatggatcaccgtgtttattgggtcctattgcttccatgctactagtatagatcaaatacttgattcctaggtccacacaagctgccaatatagtctgtgttccataatagtttactttcatgatttcattatcggtgtattttccaaatacatccactagagcagccgtatgaataatcagatttaccccatctagcgcttctctcaccttatcaaagtcgtttatatcacattgtatatagtttataaccttaactttcgaggttattggttgtggatcttctacaatatctatgactctgatttcttgaacatcatctgcactaattaacagttttactatatacctgcctagaaatccggcaccaccagtaaccgcgtacacggccattgctgccactcataatatcagactacttattctattttactaaataatggctgtttgtataatagaccacgataatatcagaggagttatttactttgaaccagtccatggaaaagataaagttttaggatcagttattggattaaaatccggaacgtatagtttgataattcatcgttacggagatattagtcaaggatgtgattccataggcagtccagaaatatttatcggtaacatctttgtaaacagatatggtgtagcatatgtttatttagatacagatgtaaatatatttacaattattggaaaggcgttatctatttcaaaaaatgatcagagattagcgtgtggagttattggtatttcttacataaatgaaaagataatacattttcttacaattaacgagaatggcgtttgatatatcagttaatgcgtctaaaacaataaatgcattagtttacttttctactcagcaaaataaattagtcatacgtaatgaagttaatgatacacactacactgtcgaatttgatagggacaaagtagttgacacgtttatttcatataatagacataatgacaccatagagataagaggggtgcttccagaggaaactaatattggttgcgcggttaatacgccggttagtatgacttacttgtataataagtatagttttaaactgattttagcagaatatataagacacagaaatactatatccggcaatatttattcggcattgatgacactagatgatttggctattaaacagtatggagacattgatctattatttaatgagaaacttaaagtagactccgattcgggactatttgactttgtcaactttgtaaaggatatgatatgttgtgattctagaatagtagtagctctatctagtctagtatctaaacattgggaattgacaaataaaaagtataggtgtatggcattagccgaacatatatctgatagtattccaatatctgagctatctagactacgatacaatctatgtaagtatctacgcggacacactgagagcatagaggatgaatttgattattttgaagacgatgattcgtctacatgttctgccgtaaccgacagggaaacggatgtataattttttttatagcgtgaaggatatgataaaaaatataattgttgtatttatcccattccaatcaccttatatgattctgtaaaaaaattatactgtaacacaataaaggagtcttatagatgtatagaggtcagatactggtttgataaactgtttattccacataagtatgtttgactttatggttagacccgcatactttaacaaatcactgaaaattggagttaggtattgacctctcagaatcagttgccgttctggaacattaaatgtattttttatgatatactccaacgcatttatgtgggcatacaacaagtcattactaatggagtattccaagagttttagttgtctagtatttaacaagagaagagatttcaacagactgtttatgaactcgaacgccgcctcattgtcgcttatattgatgatgtcgaattctcccaatatcatcactgatgagtagctcatcttgttatcgggatccaagttttctaaagatgtcattaaaccctcgatcatgaatggatttatcatcatcgtttttatgttggacatgagcttagtccgtttgtccacatctatagacgacgatttctgaattatttcatatatccctctctttaactccaggaacttgtcaggatggtctactttaatatgttctcgtctaagagatgaaaatctttggatggttgcacgcgacttttctttaaaggatgacgttgcccaagatcctctcttaaatgaatccatcttatccttggacaagatggacagtctattttccttagatggtttaatatttttgttacccatgatctataaaggtagacctaatcgtctcggatgaccatatatttattttcagttttattatacgcataaattgtaaaaaatatgttaggtttacaaaaatgtctcgtggggcattaatcgtttttgaaggattggacaaatctggaaaaacaacacaatgtatgaacatcatggaatctataccggcaaacacgataaaatatcttaactttcctcagagatccactgtcactggaaagatgatagatgactatctaactcgtaaaaaaacctataatgatcatatagttaatctattattttgtgcaaatagatgggagtttgcatcttttatacaagaacaactagaacagggaattactttaatagttgatagatacgcattttctggagtagcgtatgccgccgctaaaggcgcgtcaatgactctcagtaagagttatgaatctggattgcctaaacccgacttagttatattcttggaatctggtagcaaagaaattaatagaaacgtcggcgaggaaatttatgaagatgttacattccaacaaaaggtattacaagaatataaaaaaatgattgaagaaggagatattcattggcaaattatttcttctgaattcgaggaagatgtaaagaaggagttgattaagaatatagttatagaggctatacacacggttactggaccagtggggcaactgtggatgtaatagtgaaattacattttttataaatagatgttagtacagtgttataaatggatgaagcatattactctggcaacttggaatcagtactcggatacgtgtccgatatgcataccgaactcgcatcaatatctcaattagttattgccaagatagaaactatagataatgatatattaaacaaggacattgtaaattttatcatgtgtagatcaaacttggataatccatttatctctttcctagatactgtatatactattatagatcaagagatctatcagaccgaattgattaattcattagacgacaatgaaattatcgattgtatagttaacaagtttatgagcttttataaggataacctagaaaatatagtagatgctatcattactctaaaatatataatgaataatccagattttaaaactacgtatgccgaagtactcggttccagaatagccgatatagatattaaacaagtgatacgtaagaatatactacaattgtctaatgatatccgcgaacgatatttgtgaaaaatattaaaaaaaaatactttttttattaaatgacgtcgcttcgcgaatttagaaaattatgctgtgatatatatcacgcatcaggatataaagaaaaatctaaattaattagagactttataacagatagggatgataaatatttgatcattaagctattgcttcccggattagacgatagaatttataacatgaacgataaacaaattataaaattatatagtataatatttaaacaatctcaggaagatatgctacaagatttaggatacggatatataggagacactattaggactttcttcaaagagaacacagaaatccgtccacgagataaaagcattttaactttagaagaagtggatagttttttaactacgttatcatccgtaactaaagaatcgcatcaaataaaattattgactgatgtagcatctgtttgtacatgtaatgatttaaaatgtgtagtcatgcttattgataaagatctaaaaattaaagcgggccctcggtacgtacttaacgctattagtcctcatgcctatgatgtgtttagaaaatctaataacttgaaagagataatagaaaatgcatctaaacaaaatctagactctatatctatttctgttatgactccaattaatcccatgttagcggaatcgtgtgattctgtcaataaggcgtttaaaaaatttccatcaggaatgtttgcggaagtcaaatacgatggtgaaagagtacaagttcataaaaataataacgagtttgccttctttagtagaaacatgaaaccagtactctctcataaagtggattatctcaaagaatacataccgaaagcatttaaaaaagctacgtctatcgtattggattctgaaattgttcttgtagacgaacataatgtaccgctaccgtttggaagtttaggaatacacaaaaagaaagaatataaaaactctaacatgtgtttgttcgtgtttgactgtttgtactttgatggattcgatatgacggacattccattgtacgaacgaagatcttttctcaaagatgttatggttgaaatacccaatagaatagtattctcagagttgacgaatattagtaacgagtctcagttaactgacgtattggatgatgcactaacgagaaaattagaaggattggtcttaaaagatattaatggagtatacgaaccgggaaagagaagatggttaaaaataaagcgagactatttgaacgagggttccatggcagattctgccgatttagtagtactaggtgcctactatggtaaaggagcaaagggtggtatcatggcagtctttctaatgggttgttacgacgatgaatccggtaaatggaagacggttaccaagtgttcaggacacgatgataatacgttaagggagttgcaagaccaattaaagatgattaaaattaacaaggatcccaaaaaaattccagagtggttagtagttaataaaatctatattcccgattttgtagtagaggatccgaaacaatctcagatatgggaaatttcaggagcagagtttacatcttccaagtcccataccgcaaatggaatatccattagatttcctagatttactaggataagagaggataaaacgtggaaagaatctactcatctaaacgatttagtaaacttgactaaatcttaatagttacatacaaactgaaaattaaaataacaccatttagttggtggtcgccatggatggtgttattgtatactgtctaaacgcgttagtaaaacatggcgaggaaataaatcatataaaaaatgatttcatgattaaaccatgttgtgaaagagtttgtgaaaaagtcaagaacgttcacattggcggacaatctaaaaacaatacagtgattgcagatttgccatatatggataatgcggtatccgatgtatgcaattcactgtataaaaagaatgtatcaagaatatccagatttgctaatttgataaagatagatgacgatgacaagactcctactggtgtatataattattttaaacctaaagatgttattcctgttatcatatctataggaaaggataaagatgtctgtgaactattaatctcatcagacatatcgtgtgcatgcgtggagttaaattcatatcacgtagccattcttcccatgaatgtttccttttttaccaaaggaaatgcctcgttgattattctcctgtttgatttctctatcgatgcagcacctctcttaagaagtgtaaccgataataatgttattatatctagacaccagcgtctacatgacgagcttccgagttccaattggttcaagttttacataagtataaagtccgactattgttctatattatatatggttgttgatggatctgtgatgcatgcgatagctgataatagaactcacgcaattattagcaaaaatatattagacaatactacaattaacgatgagtgtagatgctgttattttgaaccacagattaggattcttgatagagatgagatgctcaatggatcatcgtgtgatatgaacagacattgtattatgatgaatttacctgatgtaggcgaatttggatctagtatgttggggaaatatgaacctgacatgattaagattgctctttcggtggctggtaatttaataagaaatcgagactacattcccgggagacgaggctatagctactacgtttacggtatagcctctagataatttttttaagcacgaaataaaaaacataattttaaaccaatctatttcatactattttgtgtgatcaccatggacataaagatagatattagtatttctggtgataaatttacggtgactactaggagggaaaatgaagaaagaaaaaaatatctacctctccaaaaagaaaaaactactgatgttatcaaacctgattatcttgagtacgatgacttgttagatagagatgagatgtttactattctagaggaatattttatgtacagaggtctattaggcctcagaataaaatatggacgactctttaacgaaattaaaaaattcgacaatgatgcggaagaacaattcggtactatagaagaactcaagcagaaacttagattaaattctgaagagggagcagataactttatagattatataaaggtacaaaaacaggatatcgtcaaacttactgtatacgattgcatatctatgataggattgtgtgcatgcgtggtagatgtttggagaaatgagaaactgttttctagatggaaatattgtttacgagcgattaaactgtttattaatgatcacatgcttgataagataaaatctatactgcagaatagactagtatatgtggaaatgtcatagaaagttaatgagagcaaaaatatataaggttgtattccatatttgttattttttctgtaatagttaaaaaaatacattcgatggtctatctatcagattattatgtgttataaggtactttttctcataataaactagagtatgagtaagatagtgtttttcaaaacatataaatctaaaattgatggatgagatatacagctattaatttcgaaaatatataaatctaaaattgatggataagatatacagctattaatttcgaaaatatattttaatctgataactttaaacatggatttttgatggtggtttaacgttttaaaaaaagattttgttattgtagtatatgataatattaaaagatggatataaagaatttgctgactgcatgtactattttttacattactacattggctacggcagatatacctactccgccaccaacgggtcatgtgacaagggagaatatcttgataagaggcataatcaatgttgtaatcggtgtccacctggagaatttgccaaggttagatgtaatggtaacgataacacaaaatgtgaacgctgcccacctcatacatataccacaatccccaattattctaatggatgtcatcaatgtagaaaatgcccaaccggatcatttgataaggtaaagtgtaccggaacacagaacagtaaatgttcgtgtcttcctggttggtattgcgctactgattcttcacagactgaagattgttgaaattgtgtaccaaaaaggagatgtccatgcggatactttggtggaatagatgaacaaggaaatcctatttgtaaatcgtgctgtattggtgaatattgcaactacctacgtaattatagacttgatccattttctccatgcaaactatctaaatgtaattaattatgattttgatgataatgttaccatacattatatcgctacttggttagtgtattattcagtatgaagacctattaataattacttatcttttgacgatcttgttataattataatataaaaacttatggcatagtaactcataattgctgacgcgataaattcgtaataatctgttttgttcaaatttttataaggaatctacaggcataaaaataaaaatataatttataatatactcttacagcgcgccatcatgaatagcagcagtaaattaattgctgttattaatggatttagaaatagtggacgattttgtgatattaatatagttattaatgatgaaaggataaacgctcacagactcatcctatctggagcctccgaatatttttccattctgttttccaataattttatcgattctaatgaatacgaagttaatctaagtcatttagattatcaaagtgttaacgatttgatcgattacatttatgggatacctttgagcctaactaacgataacgtgaaatatattctttcaaccgctgattttttacaaattggatctgccattactgagtgcgaaaaatacatacttaaaaatctttgttctagaaactgtatcgatttctacatatacgctgataaatataataacaagaaaatagaatcagcgtcgtttaacacaatattacgaaatattttgagactcatcaacgatgaaaactttaaatacttaacagaggaatcaatgataaaaattttaagcgatgatatgttaaatataaaaaatgaggattttgcaccactaattctcattaaatggttagagagtactcaacaatcatgcaccgtcgagttacttagatgcctcagaatatcattgctttccccacaagttataaaatcactttatagtcatcaactggttagttcaatctacgaatgtataacattcttaaacaatatagcattcttggatgaatcatttcctagataccatagcatcgagttgatatctatcggtataagtaattcgcatgataagatttccataaactgctacaatcataaaaaaaatacatgggaaatgatatcttcacgtagatataggtgtagtttcgcagtggccgtcctggataatattatctatatgatgggtggatatgatcagtccccgtatagaagttcaaaggttatagcgtacaatacatgtacaaattcttggatatatgatataccagagctaaaatatcctcgttctaattgtgggggactggctgatgacgaatacatttattgtataggcggcatacgcgatcaggattcatcgttgacatctagtattgatagatggaagccatcaaaaccatattggcagaagtatgctaaaatgcgcgaaccaaaatgtgatatgggggttgcgatgttaaacggattaatatatgtcatgggtggaatcgttaaaggtgacacgtgtaccgacgcactagagagtttatcagaagatggatggatgaagcatcaacgtcttccaataaaaatgtccaatatgtcgacgattgttcatgatggcaagatttatatatctggaggttacaacaatagtagtgtagttaatgtaatatcgaatctagtccttagctataatccgatatatgatgaatggaccaaattatcatcattaaacattcctagaattaatcccgctctatggtcagcgcataataaattatatgtaggaggaggaatatctgatgatgttcgaactaatacatctgaaacatacgataaagaaaaagattgttggacattggataatggtcacgtgttaccacgcaattatataatgtataaatgcgaaccgattaaacataaatatccattggaaaaaacacagtacacgaatgattttctaaagtatttggaaagttttataggtagttgatagaacaaaatacataattttgtaaaaataaatcactttttatactaatatgacacgattaccaatacttttgttactaatatcattagtatacgctacaccttttcctcagacatctaaaaaaataggtgatgatgcaactctatcatgtaatcgaaataatacaaatgactacgttgttatgagtgcttggtataaggtaccaaaaattgaaaataaatacaaaggttcttgagggttgtgttaaattgaaagcgagaaataatcataaatactgcagaccatgaagagcgccgttctcttcctcctggggatcattttccttgaacaatgcggtgttcgggggacacttgttattaggaacgcacgatgctcctgtattagcacctccagaggaacgatacattacaagtcactcaaagacttgaaacaattcgcgccctcccctaattgcaataagacagagataattgcgacattgaaaaacggggaccaaacttgtcttgatcctgacagcgccaatgtaaaaaaactcatgaaggagtgggaaaaaaaaattagtcaaaaaaaaaaacagaagcgcggtaagaaacaccaaaaaaacatgaaaaataggaagcctaaaacacctcaaagccgccgaaggtctcggaaaacaacctgattaattaatttttattagtagaatttcattttgtttttttctatgctataaataccatgtgtccacaaaagcttacgatctcatggttcgccattgtcctcctggtttcacctctgatggcgatgtgggagctggaaaaagacgtctatgtagtcgaagttgactggactccagatgcgcctggggagacggtcaatctcacttgcgacaccccggaagaagatgacatcacctggaccagcgatcagcggcatggtgttattggaagtggcaaaactctcacaatcacggttaaggagttcctggatgctgggcagtatacgtgccataagggaggggaaacgttgtctcattcccacctgttgctgcacaagaaggagaacggaatttggtctaccgaaattcttaagaattttaagaacaaaacttttcttaaatgcgaggcaccgaattattccgggaggtttacgtgttcctggcttgttcagcggaatatggaccttaaatttaacattaaaagtagcagcagctctccagactcacgagcagtcacgtgtggaatggcttcactttccgcagaaaaagttactcttgatcagcgggattacgaaaagtatagtgtctcttgccaagaggacgtaacttgtccgaccgcagaggagacgctccccatagagctggccctcgaagcaagacaacagaataagtatgaaaattatagtaccagtttcttcattagggatatcataaaaccagacccacccaaaaaccttcaaatgaaaccactgaagaattctcaagtagaagtcagctgggagtatcctgacagttggagcactccgcacagctattttagccttaagttcttcgttcgaatccaacgaaagaaggaaaaaatgaaagagacggaagaaggttgcaaccagaagggtgcctttctggttgaaaaaacatccacagaagttcaatgtaaaggagggaacgtatgcgtacaagcacaagataggtattacaatagttcatgcagtaagtgggcatgtgtgccctgccgggttcgcagcggtggcggtggaagtggaggcggcgggagcggcggtgggggatctagagtaatccctgtcagtggcccagcacgatgcctctcacagtctcggaacctgttgaaaactactgacgatatggtaaaaacggcacgagaaaagttgaaacattactcttgcacagccgaagatatcgaccatgaagacataacccgggatcaaacgtcaacgttgaaaacttgtctccctctcgaacttcacaagaatgaatcctgtctggccacgagggagacgtctagtacgacgcggggttcatgccttcccccccaaaaaacatcacttatgatgacgctgtgtctgggctctatctacgaggacctcaaaatgtatcaaacggagtttcaagcgataaacgcagcgcttcagaaccataaccaccagcagattatactcgataagggaatgctcgtagccattgatgaactgatgcaatcccttaaccataacggggagacattgcgacagaagcctcccgtcggagaagccgacccgtaccgcgttaaaatgaagctgtgtatccttctgcatgcattttcaacccgagtcgtcacgataaacagggtcatggggtatctttcaagcgcgtgattaattaagagctcatgcggatctttatgatacgtacaatgataatgatacagtaccaccaactactgtaggcggtagtacaacctctattagcaattataaaaccaaggactttgtagaaatatttggtattaccgcattaattatattgtcggccgtggcaatattctgtattacatattatatatataataaacgttcacgtaaatacaaaacagagaacaaagtctagatttttgacttacataaatgtctgggatagtaaaatctatcatattgagcggaccatctggttcaggaaagacagccatagccaaaagactatgggaatatatttggatttgtggtgtcccataccactagatttcctcgtcctatggaacgagaaggtgtcgattaccattacgttaacagagaggccatctggaagggaatagccgccggaaactttctagaacatactgagtttttaggaaatatttacggaacttctaaaactgctgtgaatacagcggctattaataatcgtatttgtgtgatggatctaaacatcgatggcgttagaagtcttaaaaatacgtacctaatgccttactcggtgtatataagacctacctctcttaaaatggttgagaccaagcttcgttgtagaaacactgaagcggatgatgagattcatcgtcgtgtgatgttggcaaaaactgacatggatgaggcaggtgaagccggtctattcgacactattatcattgaagatgatgtgaatttagcatatagtaagttaattcagatactacaggaccgtattagaatgtattttaacactaattagagacttaagacttaaaacttgataattaataatataactcgtttttatatgtggctatttcaacgtctaatgtattagttaaatattaaaacttaccacgtaaaacttaaaatttaaaatgatatttcattgacagatagatcacacattatgaactttcaaggacttgtgttaactgacaattgcaaaaatcaatgggtcgttggaccattaataggaaaaggtggattcggtagtatttatactactaatgacaataattatgtagtaaaaatagagcccaaagctaacggatcattatttaccgaacaggcattttatactagagtacttaaaccatccgttatcgaagaatggaaaaaatctcacaatataaagcacgtaggtcttatcacgtgcaaggcatttggtctatacaaatccattaatgtggaatatcgattcttggtaattaatagattaggtgcagatctagatgcggtgatcagagccaataataatagattaccaaaaaggtcggtgatgttgatcggaatcgaaatcttaaataccatacaatttatgcacgagcaaggatattctcacggagatattaaagcgagtaatatagtcttggatcaaatagataagaataaattatatctagtggattacggattggtttctaaattcatgtctaatggcgaacatgttccatttataagaaatccaaataaaatggataacggtactctagaatttacacctatagattcgcataaaggatacgttgtatctagacgtggagatctagaaacacttggatattgtatgattagatggttgggaggtatcttgccatggactaagatatctgaaacaaagaattgtgcattagtaagtgccacaaaacagaaatatgttaacaatactgcgactttgttaatgaccagtttgcaatatgcacctagagaattgctgcaatatattaccatggtaaactctttgacatattttgaggaacccaattacgacgagtttcggcacatattaatgcagggtgtatattattaagtgtggtgtttggtcgatgtaaaatttttgtcgataaaaattaaaaaataacttaatttattattgatctcgtgtgtacaaccgaaatcatggcgatgttttacgcacacgctctcggtgggtacgacgagaatcttcatgcctttcctggtaccaaaaattgaaaaactagcgtctttttttgctcgactgcagaccatggagacacccaagcctaggatactgccctggctcgtgagccagctcgatctcggccaactcgaaggtgtcgcttggttggacgagtcaaggacaagattcagaataccctggaagcatggcctgagacaggatgctcagatggccgattttggtatttttcaagcttgggccgaagcttctggtgcttacacccccggcaaggataaacctgatgtgtccacttggaaacggaatttccggtctgccttgaaccggaaggaagtgttgcgcctcgccgcagataactctaaagatccttacgaccctcacaaagtttatgagtttgttactcccggggcaagagattttgtgcatcttggggcttcacccgatactaatggaaaaagtagtcttccccacagtcaggagaatcttcccaaactttttgatgggcttattctcgggcccttgaaggatgaggggagttccgatttggcaatagtctctgacccaagccagcaactgccatcaccaaacgtcaacaattttctcaatccagccccccaagagaacccccttaaacagcttcttgccgaggagcaatgggagttcgaagttactgccttctatcgcgggaggcaggtattccaacaaaccttgttttgtccaggaggcttgagactcgtgggcagcactgctgatatgactctgccctggcagccagtgaccctccccgaccctgaagggttcctgactgacaaactcgtgaaggagtacgtgggacaagtactgaagggcctgggaaatggtcttgccctctggcaagctggacagtgcttgtgggctcaacgccttggacattcacacgcattttgggccctcggggaggagcttcttcctgacagtggccgcggaccagatggcgaggtacataaggataaagatggtgcagtcttcgacctcagaccatttgtcgcagaccttatcgccttcatggaaggttccggtcacagccctagatatacactttggttctgtatgggggaaatgtggccacaagatcaaccttgggtcaagcgccttgttatggtaaaggtggtccctacatgtttgaaagagctgctcgaaatggctcgggaaggaggagcctcttctttgaaaactgtagacctgcacatatctaacagccaaccaatcagcctgacctccgatcagtacaaagcttaccttcaagaccttgtcgaggacatggacttccaagccacaggcaacatttgattaattaatttttatgagctcctggtaaaagttaaacttggggagaatgatacagaaaatctttcttctactatatcggcggcaccatcgaggtaaccacctctcaagaagaccgcgtgaataatgtactcatgaaacgtttggaaactatacgccatatgtggtctgttgtatatgatcattttgatattgtgaatggtaaagaatgctgttatgtgcatacgcattcatctaatcaaaatcctataccgagtactgtaaaaacaaatttgtacatgaagactatgggatcatgcattcaaatggattccatggaagctctagagtatcttagcgaactgaaggaatcaggtggatggagtcccagaccagaaatgcaggaatttgaatatccagatggagtggaagacactgaatcaattgagagattggtagaggagttcttcaatagatcagaacttcaggctggtaaattagtcaaatttggtaattctattaattgttaaacatacatctgtttcagctaagcaactaagaacacgtatacggcagcagcttccttttatactctcatcttttaccaacacaaagggtggatatttgttcattggagttgataataatacacacaaagtatttggattcacggtgggttacgactacctcagactgatagagaatgatatagaaaagcatatcaaaagactttgtgttgtgcatttctgtgagaagaaagaggacatcaagtacacgtgtcgattcatcaaggtatataaacctggggatgaggctacctcgacatacgtgtgcgctatcaaagtggaaagatgctgttgtgctgtgtttgcagattggccagaatcatggtatatggatactaatggtatcaagaagtattctccagatgaatgggtgtcacatataaaattttaattaatgtaactatagagaacaaataataggttgtaatatcatatagacaataactaacaattaattagtaactgttatctcttttttaactaaccaactaactatatacctattaatacatcgtaattatagttcttaacatctattaatcattgattcgcttctttaattttttataaactaacattgttaattgaaaagggataacatgttacagaatataaattatatatggatttttttaaaaaggaaatacttgactggagtgtatatttatctcttcattatatagcacgcgtgtgttccaattcttccacatcccatataatacaggattataatctcgttcgaacatacgagaaagtggataaaacaatagttgattttttatctaggttgccaaatttattccatattttagaatatggggaaaatattctacatatttattctatggatgatgctaatacgaatattataattttttttctagatagagtattaaatattaataagaacgggtcatttatacacaatctcaggttatcatcatccattaatataaaagaatatgtatatcaattagttaataatgatcatccagataataggataagactaatgcttgaaaatggacgtagaacaagacattttttgtcctatatatcagatacagttaatatctatatatgtattttaataaatcatggattttatatagatgcagaagacagttacggttgtacattattacatagatgtatatatcactataagaaatcagaatcagaatcatacaatgaattaattaagatattgttaaataatggatccgatgtagataaaaaagatacgtacggaaacacaccttttatcctattatgtaaacacgatatcaacaacgtggaattgtttgagatatgtttagagaatgctaatatagactctgtagactttaatagatatacacctcttcattatgtctcatgtcgtaataaatatgattttgtaaagttattaatttctaaaggagcaaatgttaatgcgcgtaataaattcggaactactccattttattgtggaattatacacggtatctcgcttataaaactatatttggaatcagacacagagttagaaatagataatgaacatatagttcgtcatttaataatttttgatgctgttgaatctttagattatctattatccagaggagttattgatattaactatcgtactatatacaacgaaacatctatttacgacgctgtcagttataatgcgtataatacgttggtctatctattaaacagaaatggtgattttgagacgattactactagtggatgtacatgtatttcggaagcagtcgcaaacaacaacaaaataataatggaagtactattgtctaaacgaccatctttgaaaattatgatacagtctatgatagcaattactaaaaataaacaacataatgcagatttattgaaaatgtgtataaaatatactgcgtgtatgaccgattatgatactcttatagatgtacagtcgctacagcaatataaatggtatattttaaaatgtttcgatgaaatagatatcatgaagagatgttatataaaaaataaaactgtattccaattagttttttgtatcaaagacattaatactttaatgagatatggtaaacatccttctttcgtgaagtgcactagtctcgacgtatacggaagtcgtgtacgtaatatcatagcatctattagatatcgtcagagattaattagtctattatccaagaagctggatgcgggagataaatggtcgtgttttcctaacgaaataaaatataaaatattggaaaactttaacgataacgaactatccacatatctaaaaatcttataaacactattaaaatataaaatctaagtaggataaaatcacactacatcattgtttccttttagtgctcgacagtgtatactatttttaacactcataaataaaaatgaaaacgatttccgttgttacgttgttatgcgtactacctgctgttgtttattcaacatgtactgtacccactatgaataacgctaaattaacgtctaccgaaacatcgtttaatgataaacagaaagttacatttacatgtgatcagggatatcattctttggatccaaatgctgtctgcgaaacagataaatggaaatacgaaaatccatgcaagaaaatgtgcacagtttctgattatgtctctgaattatatgataagccattatacgaagtgaattccaccatgacactaagttgcaacggcgaaacaaaatattttcgttgcgaagaaaaaaatggaaatacttcttggaatgatactgttacgtgtcctaatgcggaatgtcaacctcttcaattagaacacggatcgtgtcaaccagttaaagaaaaatactcatttggggaatatatgactatcaactgtgatgttggatatgaggttattggtgcttcgtacataagttgtacagctaattcttggaatgttattccatcatgtcaacaaaaatgtgatataccgtctctatctaatggattaatttccggatctacattttctatcggtggcgttatacatcttagttgtaaaagtggttttatactaacgggatctccatcatccacatgtatcgacggtaaatggaatcccatactcccaacatgtgtacgatctaacgaaaaatttgatccagtggatgatggtcccgacgatgagacagatttgagcaaactctcgaaagacgttgtacaatatgaacaagaaatagaatcgttagaagcaacttatcatataatcatagtggcgttaacaattatgggcgtcatatttttaatctccgttatagtattagtttgttcctgtgacaaaaataatgaccaatataagttccataaattgctaccgtaaatataaatccgttaaaataattaataatttaataacaaacaagtatcaaaagattaaagacttatagctagaatcaattgagatgtcttcttcagtggatgttgatatctacgatgccgttagagcatttttactcaggcactattataacaagagatttattgtgtatggaagaagtaacgccatattacataatatatacaggctatttacaagatgcgccgttataccgttcgatgatatagtacgtactatgccaaatgaatcacgtgttaaacaatgggtgatggatacacttaatggtataatgatgaatgaacgcgatgtttctgtaagcgttggcaccggaatactattcatggaaatgtttttcgattacaataaaaatagtatcaacaatcaactaatgtatgatataattaatagcgtatctataattctagctaatgagagatatagaagcgcttttaacgacgatggtatatacatccgtagaaatatgattaacaagttgtacggatacgcatctctaactactattggcacgatcgctggaggtgtttgttattatctgttgatgcatctagttagtttgtataaataattatttcaatatactagttaaaattttaagattttaaatgtataaaaaactaataacgtttttatttgtaataggtgcattagcatcctattcgaataatgagtacactccgtttaataaactgagtgtaaaactctatatagatggagtagataatatagaaaattcatatactgatgataataatgaattggtgttaaattttaaagagtacacaatttctattattacagagtcatgcgacgtcggatttgattccatagatatagatgttataaacgactataaaattattgatatgtataccattgactcgtctactattcaacgcagaggtcacacgtgtagaatatctaccaaattatcatgccattatgataagtacccttatattcacaaatatgatggtgatgagcaacaatattctattactgcagagggaaaatgctataaaggaataaaatatgaaataagtatgatcaacgatgatactctattgagaaaacatactcttaaaattggatctacttatatatttgatcgtcatggacatagtaatacatattattcaaaatatgatttttaaaaatttaaaatatattatcacttcagtgacagtagtcaaataacaaacaacaccatgagatatattataattctcgcagttttgttcattaatagtatacacgctaaaataactagttataagtttgaatccgtcaattttgattccaaaattgaatggactggggatggtctatacaatatatcccttaaaaattatggcatcaagacgtggcaaacaatgtatacaaatgtaccagaaggaacatacgacatatccgcatttccaaagaatgatttcgtatctttctgggttaaatttgaacaaggcgattataaagtggaagagtattgtacgggactatgcgtcgaagtaaaaattggaccaccgactgtaacattgactgaatacgacgaccatatcaatttgtacatcgagcatccgtatgctactagaggtagcaaaaagattcctatttacaaacgcggtgacatgtgtgatatctacttgttgtatacggctaacttcacattcggagattctaaagaaccagtaccatatgatatcgatgactacgattgcacgtctacaggttgcagcatagactttgtcacaacagaaaaagtgtgcgtgacagcacagggagccacagaagggtttctcgaaaaaattactccatggagttcgaaagtatgtctgacacctaaaaagagtgtatatacatgcgcaattagatccaaagaagatgttcccaatttcaaggacaaaatggccagagttatcaagagaaaatttaataaacagtctcaatcttatttaactaaatttctcggtagcacatcaaatgatgttaccacttttcttagcatgcttaacttgactaaatattcataactaatttttattaatgatacaaaaacgaaataaaactgcatattatacactggttaacgcccttataggctctaaccattttcaagatgaggtccctgattatagtccttctgttcccctctatcatctactccatgtctattagacgatgtgagaagactgaagaggaaacatggggattgaaaatagggttgtgtataattgccaaagatttctatcccgaaagaactgattgcagtgttcatctcccaactgcaagtgaaggattgataactgaaggcaatggattcagggatatacgaaacaccgataaattataaaaaaagcaatgtgtccgctgtttccgttaataatactattttcgtaactggcggattattcataaataactctaatagcacgatcgtggttaacaatatggaaaaacttgacatttataaagacaaacaatggtcgattatagaaatgcctatggctagggtatatcacggcatcgactcgacatttggaatgttatattttgccggaggtctatccgttaccgaacaatatggtaatttagagaaaaacaacgagatatcttgttacaatcctagaacgaataagtggtttgatatttcatatactatttataagatatccatatcatcattgtgtaaactaaataacgtcttctatgtatttagtaaggacattggatatgtggaaaagtatgatggtgcatggaagttagtacatgatcgtctccccgctataaaggcattatcaacttctccttattgattgaaaatgaaaatataaatagtttttatgtatagcagtattaccctatagttttattgcttactactaacatggatacagatgttacaaatgtagaagatatcataaatgaaatagatagagagaaagaagaaatactaaaaaatgtagaaattgaaaataataaaaacattaacaagaatcatccaagtggatatattagagaagcactcgttattaatacaagtagtaatagtgattccattgataaagaagttatagaatgtatcagtcacgatgtaggaatatagatcatatctactaatttttataatcgatacaaaacataaaaaacaactcgttattacatagcaggcatggaatccttcaagtattgttttgataacgatggcaagaaatggattatcggaaatactttatattctggtaattcaatactatataaggtcagaaaaaatttcactagttcgttctacaattacgtaatgaaaatagatcacaaatcacacaagccattgttgtctgaaatacgattctatatatctgtattggatcctttgactatcgacaactggacacgggaacgtggtataaagtatttggctattccagatctgtatggaattggagaaaccgatgattatatgttcttcgttataaagaattcgggaagagtattcgccccaaaggatactgaatcagtcttcgaagcatgcgtcactatgataaacacgttagagtttatacactctcgaggatttacccatggaaaaatagaaccgaggaatatactgattagaaataaacgtctttcactaattgactattctagaactaacaaactatacaagagtggaaactcacatatagattacaacgaggacatgataacttcaggaaatatcaattatatgtgtgtagacaatcatcttggagcaacagtttcaaaacgaggagatttagaaatgttgggatattgcatgatagaatggttcggtggcaaacttccatggaaaaacgaaagtagtataaaagtaataaaacaaaaaaaagaatataaaaaatttatagctactttctttgaggactgttttcctgaaggaaatgaacctctggaattagttagatatatagaattagtatacacgttagattattctcaaactcctaattatgacagactacgtaaactgtttatacaagattgaaattatattctttttttatagagtgtggtagtgttacggatatctaatattaatattagactatctctatcgcgctacacgaccaatatcgattactatggatatcttcagggaaatcgcatcttctatgaaaggagagaatgtattcatttctccagcgtcaatctcgtcagtattgacaatactgtattatggagctaatggatccactgctgaacagctatcaaaatatgtagaaacggaggagaacacggataaggttagcgctcagaatatctcattcaaatccatgaataaagtatatgggcgatattctgccgtgtttaaagattcctttttgagaaaaattggcgataagtttcaaactgttgacttcactgattgtcgcactatagatgcaatcaacaagtgtgtagatatctttactgaggggaaaatcaatccactattggatgaaccattgtctcctgatacctgtctcctagcaattagtgccgtatactttaaagcaaaatggttgatgccattcgaaaaggaatttaccagtgattatcccttttacgtatctccgacggaaatggtagatgtaagtatgatgtctatgtacggcaaggcatttaatcacgcatctgtaaaggaatcattcggcaacttttcaatcatagaactgccatatgttggagatactagtatgatggtcattcttccagacaagattgatggattagaatccatagaacaaaatctaacagatacaaattttaagaaatggtgtaactctctggaagctacgtttatcgatgttcacattcccaagtttaaggtaacaggttcgtataatcttgtggatactctagtaaagtcaggactgacagaggtgttcggttcaactggagattatagcaatatgtgtaattcagatgtgagtgtcgacgctatgattcacaaaacgtatatagatgtcaatgaagagtatacagaagcagctgcagcaacttgtgcactggtgtcagactgtgcatcaacaattacaaatgagttctgtgtagatcatccgttcatctatgtgattaggcatgttgatggaaaaattcttttcgttggtagatattgctctccgacaactaattgttaaccattttttttaaaaaaatagaaaaaacatgtggtattagtgcaggtcgttgttcttccaattgcaattggtaagatgacggccaactttagtacccacgtcttttcaccacagcactgtggatgtgacagactgaccagtattgatgacgtcagacaatgtttgactgaatatatttattggtcgtcctatgcataccgcaacaggcaatgcgctggacagttgtattccacactcctctcttttagagatgatgcggaatcagtgttcatcgacattcgcgagctggtaaaaaatatgccgtgggatgatgtcaaagattgtacagaaatcatccgttgttatataccggatgagcaaaaaaccatcagagagatttcggccatcatcggactttgtgcatatgctgctacttactggggaggtgaagaccatcccactagtaacagtctgaacgcattgtttgtgatgcttgagatgctcaattacgtggattataacatcatattccggcgtatgaattgatgagttgtacatcttgacattttctttcttctcttctccctttcttctcttctcccttcctccctcttctccctttcccagaaacaaacttttttacccactataaaataaaatgagtatactacctattatatttcttcctatatttttttattcttcattcgttcagacttttaacgcgcctgaatgtatcgacaaagggcaatattttgcatcattcatggagttagaaaacgagccagtaatcttaccatgtcctcaaataaatacgctatcatccggatataatatattagatattttatgggaaaaacgaggagcggataatgatagaattataccgatagataatggtagcaatatgctaattctgaacccgacacaatcagactctggtatttatatatgcattaccacgaacgaaacctactgtgacatgatgtcgttaaatttgacaatcgtgtctgtctcagaatcaaatatagatcttatctcgtatccacaaatagtaaatgagagatctactggcgaaatggtatgtcccaatattaatgcatttattgctagtaacgtaaacgcagatattatatggagcggacatcgacgccttagaaataagagacttaaacaacggacacctggaattattaccatagaagatgttagaaaaaatgatgctggttattatacatgtgttttagaatatatatacagaggtaaaacatataacgtaaccagaattgtaaaattagaggtacgggataaaataataccttctactatgcaattaccagatggcattgtaacttcaataggtagtaatttgactattgcgtgtagagtatcgttgagacctcccacaacggatgcagacgtcttttggataagtaatggtatgtattacgaagaagatgatggggacggagacggtagaataagtgtagcaaataaaatctatatgaccgataagagacgtgttattacatcccggttaaacattaatcctgtcaaggaagaagatgctacaacgtttacgtgtatggcgtttactattcctagcatcagcaaaacagttactgttagtataacgtgaatgtatgttgttacatttccatgtcaattgagtttataagaatttttatacattatcttccaacaaacaattgacgaacgtattgctatgattaactcccacgatactatgcatattattaatcattaacttgcagactatacctagtgctattttgacatactcatgttcttgtgtaattgcggtatctatattattaaagtacgtaaatctagctatagttttattatttaattttagataatataccgtctccttatttttaaaaattgccacatcctttattaaatcatgaatgggaatttctatgtcatcgttagtatattgtgaacaacaagagcagatatctataggaaagggtggaatgcgatacattgatctatgtagttttaaaacacacgcgaactttgaagaatttatataaatcattccatcgatacatccttctatgttgacatgtatatatccaggaattcttttattaatgtcaggaaatgtataaactaaaacattgcccgaaagcggtgcctctatctgcgttatatccgttcttaacttacaaaatgtaaccaatacctttgcatgacttgttttgttcggcaacgttagtttaaacttgacgaatggattaattacaatagcatgatccgcgcatctattaagtttttttactttaacgcccttgtatgtttttacagagactttatctaaatttctagtacttgtatgtgttataaatataacgggatatagaactgaatcacctaccttagatacccaattacattttatcagatccagataataaacaaattttgtcgccctaactaattctatattgttatatattttacaattggttatgatatcatgtaataacttggagtctaacgcgcatcgtcgtacgtttatacaattgtgatttagtgtagtatatctacacatgtatttttccgcactatagtattctggactagtgataaaactatcgttatatctgtcttcaatgaactcatcgagatattgctctctgtcatattcatacacctgcataaactttctagacatcttacaatccgtgttattttaggatcatatttacatatttacgggtatatcaaagatgttagattagttaatgggaatcgtctataataatgaatattaaacaattatatgaggacttttaccacaaagcatcataaaaatgagtcgtcgtctgatttatgttttaaatatcaaccgcaaatcaactcataaaatacaagagaatgaaatatatacatattttagtcattgcaatatagaccatacttctacagaacttgattttgtagttaaaaactatgatctaaacagacgacaacatgtaactgggtatactgcactacactgctatttgtataataattactttacaaacgatgtactgaagatattattaaatcatgacgtaaatgtaacgatgaaaaccagtagcggacgtatgcctgtttatatattgcttactagatgttgcaatatttcacatgatgtagtgatagatatgatagacaaagataaaaaccacttattacatagagactattccaacctattactagagtatataaaatctcgttacatgttattaaaggaagaggatatcgatgagaacatagtatccactttattagataagggaatcgatcctaactttaaacaagacggatatacagcgttacattattattatttgtgtctcgcacacgtttataaaccaggtgagtgtagaaaaccgataacgataaaaaaggccaagcgaattatttctttgtttatacaacatggagctaatctaaacgcgttagataattgtggtaatacaccattccatttgtatcttagtattgaaatgtgtaataatattcatatgactaaaatgctgttgacttttaatccgaatttcaaaatatgtaataatcatggattaacgcctatactatgttatataacttccgactacatacaacacgatattcttgttatgttaatacatcactatgaaacaaatgttggagaaatgccgatagatgagcgtcgtatgatcgtattcgagtttatcaaaacatattctacacgtccggcagattcgataacttatttgatgaataggtttaaaaatataaatatttatacccgctatgaaggaaagacattattacacgtagcatgtgaatataataatacacacgtaatagattatcttatacgtatcaacggagatataaatgcgttaaccgacaataacaaacacgctacacaactcattatagataacaaagaaaattccccgtataccatcgattgtttactgtatatacttagatatattgtagataagaatgtgataagatcgttggtggatcaacttccatctctacctatcttcgatataaaatcatttgagaaattcatatcctactgtatacttttagatgacacattttacgataggcacgttaagaatcgcgattctaaaacgtatcgatacgcattttcaaaatacatgtcgtttgataaatacgatggtataataactaaatgtcacgacgaaacaatgttactcaaactgtccactgttctagacactacactatatgcagttttaagatgccataattcgaaaaagttaagaagatacctcaacgagttaaaaaaatataataacgataagtcctttaaaatatattctaatattatgaatgagagataccttaatgtatattataaagatatgtacgtgtcaaaggtatatgataaactatttcctgttttcacagataaaaattgtctactaacattactaccttcagaaattatatacgaaatattatacatgctgacaattaacgatctttataatatatcgtatccacctaccaaagtatagttgtatttttctcatgcgatgtgtgtaaaaaaactgatattatataaatattttagtgccgtataataaagatgacgatgaaaatgatggtacatatatatttcgtatcattattgttattgctattccacagttacgccatagacatcgaaaatgaaatcacagaattcttcaataaaatgagagatactctaccagctaaagactctaaatggttgaatccagcatgtatgttcggaggcacaatgaatgatatagccgctctaggagagccattcagcgcaaagtgtcctcctattgaagacagtcttttatcgcacagatataaagactatgtggttaaatgggagaggctagaaaagaatagacggcgacaggtttctaataaacgtgttaaacatggtgatttatggatagccaactatacatctaaattcagtaaccgtaggtatttgtgtaccgtaactacaaagaatggtgactgtgttcagggtatagttagatctcatattaaaaaacctccttcatgcattccaaaaacatatgaactaggtactcatgataagtatggcatagacttatactgtggaattctttacgcaaaacattataataatataacttggtataaagataataaggaaattaatatcgacgacattaagtattcacaaacgggaaagaaattaattattcataatccagagttagaagatagtggaagatacaactgttacgttcattacgacgacgttagaatcaagaatgatatcgtagtatcaagatgtaaaatacttacggttataccgtcgcaagaccacaggtttaaactaatactagatccaaaaatcaacgtaacgataggagaacctgccaatataacatgcactgctgtgtcaacgtcattattgattgacgatgtactgattgaatgggaaaatccatccggatggcttataggattcgattttgatgtatactctgttttaactagtagaggcggtattaccgaggcgaccttgtactttgaaaatgttactgaagaatatataggtaatacatataaatgtcgtggacacaactattattttgaaaaaacccttacaactacagtagtattggagtaaatacacaatgcatttttatatacattactgaataattattattattatttatatcgtatttgtgctataacgcgactatctaggtatttgtatctcactgatagagaacatataaatatagactctattaaacagttgtgtaaaatatcaaatcctaatagatgtggatgtacggctttacatgagtacttttataattatagatcagtcaacggaaaatacaagtatagatacaacggttactatcaatattatttatctagcgattatgaaaattataatgaatattattatgatgattatgatagaactggtatgaacagtgagagtgataatatatcaatcaaaacagaatatgaattctatgatgaaacacaagatcaaagtacacaactagtaggttacgacattaaactcaaaaccaatgaggatgattttatggctatgatagatcagtgggtgtccatgattatatagatgaatcaattaataaagtagtatatggaagagagtctcacgtaagatggcgggatatatggcaagaacataatgatggcgtatacagtataggaaaggagtgcatagataatatatacgaagacaaccataccgtagacgaattctacaagatagacagcgtatcagatgtagatgacgcggaacacatatctccgataactaatgatgtatctacacaaacatgggaaaagaaatcagagttagatagatacatggaaatgtatcctcgtcatagatatagtaagcattctgtctttaagggattttctgacaaagttagaaaaaatgatttagacatgaatgtggtaaaagaattactttctaacggtgcatctctaacaattaaggatagcagtaataaggatccaataaccgtttattttcgaagaacgataatgaatttagaaatgattgatattattaacaaacatacaactattgatgaacgaaagtatatagtacactcctatctaaaaaattataaaaatttcgattatccatttttcaggaagttagttttgactaataaacattgtctcaacaattattataatataagcgacagcaaatatggaacaccgctacatatattggcgtctaataaaaaattaataactcctaattacatgaagttattagtgtataacggaaatgatataaacgcacgaggtgaagatacacaaatgcgaactccattacacaaatatttgtgtaaatttgtatatcataatattgaatatggtatccgatactataatgaaaagattatagacgcatttatagagttaggagccgatctaactattccaaataacgatggaatgataccagtagtttactgtatacactcaaatgcagaatatggttataacaatattactaacataaagataatacgtaaactacttaatcttagtagacgtgcgtcacataatctatttagagatcgagtcatgcacgattatataagtaatacatatattgatcttgagtgtttagatattattagatcgttggatggattcgatatcaatggttactttgaaggacgtacaccacttcattgcgctatacaacataacttcactcagattgctaagtacttattagatcgaggagctgatatagtcgtacccaacacattgattatacatcagtacatacagtaaatagcatagatatggaggaggatacaaatatttcaaataaagttataaggtacaacactgtcaataatatatggaagacattacctaacttctggactggaactataaatccaggcgtggtctcgcataaagatgatatatatgttgtatgcgacatcaaagatgaaaaaaatgttaagacttgtatatttagatataacacgaatacgtataacggatgggaattggttacgacgacagaaagcagattatcagctctgcatactattcttcatgacaataccataatgatgttacattgttatgaatcgtatatgttacaagatacatttaatgtgtacactcgcgaatggaatcatatgtgtcatcaacattcgaatagttatatcatgtacaatatactacccatctactaaatataatagaataaaataaatgagtatgatcattttagataacgattgattttatcattaccgcttcattcttatattctttgcttacggaacctatatttagaaacatctactaacgattttttatgcttgcattattaatggtatgtaatatgattgattgtgtacgcaataccaatttgttaagtatgaatacggggtacaaacataaactgaaatttaacattatttatttatgatatatatcgttatcgttattgtttggtctataccatggatatctttaaagaactaatcttaaaacaccctgatgaaaatgttttgatttctccagtttctattttatctactttatctattctaaatcatggagcagctggttctacagctgaacaactatcaaaatatatagagaatatgaatgagaatacacccgatgataagaaggatgacaataatgacatggacgtagatattccgtattgtgcgacactagctaccgcaaataaaatatacggtagcgatagtatcgagttccacgcctccttcctacaaaaaataaaagacgattttcaaactgtaaactttaataatgctaaccaaacaaaggaactaatcaacgaatgggttaagacgatgacaaatggtaaaattaattccttattgactagtccgctatccattaatactcgtatgacagttgttagcgccgtccattttaaagcaatgtggaaatatccattttctaaacatcttacatatacagacaagttttatatttctaagaatatagttaccagtgttgatatgatggtgggtaccgagaataacttgcaatatgtacatattaatgaattattcggaggattctctattatcgatattccatacgagggaaactctagtatggtaattatactaccggacgacatagaaggtatatataacatagaaaaaaatataacagatgaaaaatttaaaaaatggtgtggtatgttatctactaaaagtatagacttgtatatgccaaagtttaaagtggaaatgacagaaccgtataatctggtaccgattttagaaaatttaggacttactaatatattcggatattatgcagattttagcaagatgtgtaatgaaactatcactgtagaaaaatttctacatacgacgtttatagatgttaatgaggagtatacagaagcatcggccgttacaggagtatttatgactaacttttcgatggtatatcgtacgaaggtctacataaaccatccattcatgtacatgattaaagacaacacaggacgtatactttttatagggaaatactgctatccgcaataaatataaacaaatagacttttatcacgtttatctatgtctaaatattacaaatagtaatagtataaactaaagctgataatacttaaaaaaataataatatcatttacaattaatagtataaactaaaaattaaacaaatcgttattataagtaatatcaaaatgatgatatacggattaatagcgtgtcttatattcgtgacttcatccatcgctagtccactttatattcccgttattccacccattacggaagataaatcgttcaatagtgtagaggtattagtttccttgtttagagatgaccaaaaagactatacggtaacttctcagttcaataactacactatcgataccaaagactggactatcggcgtactatccacacctgatggtttggatataccattgactaatataacttattggtcacggtttactataggtcgtgcattgttcaaatcagagtctgaggatattttccaaaagaaaatgagtattctaggtgtttctatagaatgtaagaagtcgtcgacattacttacttttttgaccgtgcgtaaaatgactcgagtatttaataaatttccagatatggcttattatcgaggagactgtttaaaagccgtttatgtaacaatgacttataaaaatactaaaactggagagactgattacacgtacctctctaatggggggttgcctgcatactatcgtaatggggtcgatggttgattattgattagtatattccttattcacacaaaaagaacatttttataaacatgaaaccactgtctaaatgtaattatgatcttgatttatagatgaagatcagcctttagaggattttaaccagtatgtttaatatgaaaaaaataaacataacatattttgagattaagcgctattgtgcttaattattttgctctataaactgaatatatagccacaattattgacgggcttgtttatgaccggcaatcatgaatttacagaaattatctctggctatatatcttactgcgacatgttcgtggtgttatgaaacatgcataagaaaaactgcgttgtatcatgacattcaattggagcatgtagaagacaataaagatagtgtagcgtcgctaccgtacaagtagtcaatcaaagagaacgtagtagattgttggctacatttaattggacagatatagctgagggtgttagaaatgagttcattaaaatatgtgatatcaacggaacatatttatataattatactattgctgttagtataattattgattccacggaagaactaccaacagttactccaattacaacaacatatgaaccttctacatataattatactatcgatgatagcactgttattactactgaagaactacaagtgactcctcatatggatctccatcgatgatacatgtattaaaatactttccgaataagtcttttaaatattgtattaattatgaaaaactatgctatgcgagtatgatgcaaagatgtttaatgatacgatactagattttatctctagcgagagatgtcgttagaatcatttatcataactacgtttaataataattcatcaacgaatatcgataacatgtgtcatttatacgttaaagtctgtccgtcttctctattgtttagactgtttgtagaatgctgtgatataaacaaactagtagaaggtacgactccgttacactgttatctaatgaatgaaggatttgaatcatctgttttaaaaaacctattaaaggagtatgtcatgaatacgtttaatgttcatgacatccattacacaaatatttaactcatgatgaagttgagaatgatatgctttctgatagtatagatagctttagctaatataaaaatatattaatccactatatattctagacttgatttaaaaccgataaactactactacgtactgtataagttgttaaaaaaaggagcagaccctaattatgtagatgatagaggtaatacttttcttcattacttctgcatctatatgtccacttatgagaaaacgtcatttaataagatgcatcgtgaaaagaaatttattaaagagttggtaaaatatgaaaccgaaagtaaataatataggaaatacacctctacataactacgtatctcaatatgatatcactctcattcctcatccacaacccattaaaaaaatggaaattaaagccctctattagcataaacggctacaggtctacctttacaatggcctctccttgtgcccagttcagaccctgtcattgccacgctactaaggactccctgaataccgtggccgacgtcagacattgtctgactgaatacatcctgtgggtttctcatagatggacccatagagaaagcgcagggtctctctacaggcttctcatctctttcagaactgatgcaacggagctctttggtggtgagttgaaggattcacttccgtgggacaatatcgacaattgcgtggagatcattaaatgtttcatcagaaatgactccatgaaaaccgccgaagaacttcgtgcaatcattggactttgtactcaatcagctatcgtctctggaagagtcttcaacgataagtatatcgacatactacttatgctgcgaaagattctgaacgagaacgactatctcaccctcttggatcatatccgcactgctaaatactaaatctccttcatgctctctcactacactttttatcatcttatgaggaatgattgccttcatcatttttcgtgaaataggaataattagcaccagaatagctatggattgcacatgtattctatgtcgtctactggatgaagatgtgacgtacaaaaaaataaaactagaaattgaaacgtgtcacaacttatcaaaacatatagatagacgaggaaacaatgcgctacattgttacgtcttcaataaatgcgatacagacattaagattgttcgactgttactctctcgcggagtcgagagactttgtagaaacaacgaaggattaactccgctaggagcatacagtaagcatagatacgtaaaatctcaaattgtgcatctactgatatccagctattcgaattcctctaacgaactcaagtcgaatataaatgatttcgatctgtattcgtatatgtcttcggataatatcgacttacgtctgctaaaatacctaattgtggataaacggatacgtccgtccaagaatacgaattatgcaatcaatggtctcggattggtggatatatacgtaacgacgcctaatccgagaccagaagtattgctatggcttcttaaatcagaatgttacagcaccggttacgtatttcgtacctgtatgtacgacagtgatatgtgtaagaactctcttcattactatatatcgtctcatagagaatctcaatctctatccaaggatgtaattaaatgtttgatcaataacaatgtttccatccatggcagagacgaaggaggatctttacccatccaatactactggtcttgctcaaccatagatatagagattgttaaattattaataaaggatgtggacacgtgtagagtatacgacgtcagccctatattagaggcggattatctaaacaagcgatttagagtaaccccatataatgtagacatggaaatcgttaatcttcttattgagagacgtcatactcttgtcgacgtaatgcgtagtattacttcttacgattccagagactataaccactacatcatcgataacattctaaagagatttagacaacaggatgaatccatcgtacaagccatgttgataaactacttacattacggcgatatggtcgttcgatgcatgttagataacggacaacaactatcctctgcacgactactttgttaataataatctcgtcgatgtaaacgtcgtaaggtttatcgtggaaaataatggacacatggctgtaaatcacgtatcgaacaatggccgtctatgtatgtacggtctgatattatcgagatttaataattgcgggtatcactgttatgaaaccatactaatagatgtatttgatatactaagcaagtacatggataatatagatatgatcgataatgagaataaaactctactatattacgcggtcgatgtcaataatatacaatttgcaaagcggttattggaatatggagcgagtgttacaacatcacgctcgataatcaatacggccatccagaaaagtagttacagaagagaaaacaaaacgaggatagttgatttattacttagctaccatcccactctagagactatgattgacgcatttaatagagatatacgctatctatatcctgaaccattattcgcctgtatcagatacgccttaatcctagatgatgattttccttctaaagtaagtatgatatctccggtcgtcataaggaactaaagcgctatagagtagacattaatagaatgaagaatgcctacatatcaggcgtctccatgtttgatatattatttaaacgaagcaaacgccacagattgagatacgcaaagaatccgacatcaaatggtacaaaaaagaactaacgtccatcattacagaaactgtaaagaacaatgagaggatcgactccatagtggacaacattaatacagacgataacttgatttcgaaattacccatggagatactttattactccattaaataatttatcatggagcgataatgtcctgtttcatttgtttccatgacatattacaaaatcgattccgtccaagatgataaaaacatttaccggcatcataaacacggagtttattttatatgtctcgcataaacattactaaaaaaatatattgttcggttttctttcacatctttaattatgaaaaagtaaatcattatgagatggacgagattgtacgcatcgttcgcgacagtatgtggtacatacctaacgtatttatggacgacggtaagaatgaaggtcacgtttctgtcaacaatgtttgtcatatgtattttacgttctttgatgtggatacatcgtctcatctgtttaagctagttattaaacactgcgatctgaataaacgaggtaactctccattacattgctatacgatgaatacacgatttaatccatctgtattaaagatattgttacaccacggcatgcgtaactttgatagcaaggatgaaaaaggacatattcctctacaccactatctgattcattcactatcaatcgataacaagatctttgatatactaacggacaccattgatgactttagtaaatcatccgatctattgctgtgttatcttagatataaattcaatgggagcttaaactattacgttctgtacaaaggatccgaccctaattgcgtcgacgaggatggactcacttctcttcattactactgtaaacacatatccacgttctacaaaagcaattattacaagttaagtcacactaagatgcgagccgagaagcgattcatctacgcgataatagattatggagcaaacattaacgcggttacacacttaccttcaacagtataccaaacatagtcctcgtgtggtgtatgctcttttatctcgaggagccgatacgaggatacgtaataatcttgattgtacacccatcatggaacgattgtgcaacaggtcatattctcataatgttactcaattggcacgaacaaaaggaagaaggacaacatctactttatctattcataaaacataatcaaggatacactctcaatatactacggtatctactagataggttcgacattcagaaagacgaatactataataccgcctttcaaaattgtaacaacaatgttgcctcatacatcggatacgacatcaaccttccgactaaagacggtattcgacttggtgtttgaaaacagaaacatcatatacaaggcggatgttgtgaatgacatcatccaccacagactgaaagtatctctacctatgattaaatcgttgttctacaagatgtcagaattctctccctacgacgattactacgtaaaaaagatactagcctactgcctattaagggacgagtcattcgcggaactacatagtaaattctgtttaaacgaggactataaaagtgtatttatgaaaaatatatcattcgataagatagattccatcatcgtgacataagtcgccttaaagagattcgaatctccgacaccgacctgtatacggtatcacagctatcttaaagccatacattcggacagacacatttcatttcccatgtacgacgatctcatagaacagtgccatctatcgatggagcataaaagtaaactcgtcgacaaagcactcaataaattagagtctaccatcggtcaatctagactatcgtatttgcctccggaaattatgcgcaatatcatctaaacagtatgttgtacggaaagaaccattacaaatattatccatgatagaaagaaaatatctatatgattggagaagtaggaaacaggaacaagacgacgattactacattattaaatcatgaagtccgtattatactcgtatatattgtttctctcatgtataataataaacggaagagatatagcaccgcatgcaccatccgatggaaagtgtaaagacaacgaatacaaacgccataatttgtgtccgggaacatacgcttccagattatgcgatagcaagactaacacacgatgtacaccctgtggttcgggtaccttcacatctcgcaataatcatttacccgcttgtctaagttgtaacggaagacgcgatcgtgtaacacgactcacaatagaatctgtgaatgctctcccggatattattgtcttctcaaaggatcatccggatgcaaggcatgtgtttcccaaacaaaatgtggaataggatacggagtatccggagacgtcatctgttctccgtgtggtctcggaacatattctcacaccgtctcttccgcagataaatgcgaacccgtacccagtaatacctttaactatatcgatgtggaaattaatctgtatcccgtcaacgacacgtcgtgtactcggacgaccactaccggtctcagtgaatccatctcaacgtcggaactaactattactatgaatcataaagactgtaatcccgtatttcgtgaggaatacttctctgtccttaataaggtagcaacttcaggtttctttacaggagaaaggtgtgcactctgaatttcgagattaaatgcaataacaaagattcttcctccaaacagttaacgaaagcaaagaatgatgacggtatcatgccgcattcggagacagtaactctagtgggcgactgtatatctagcgtcgacatctatatactatatagtaataccaatactcaagactacgaaactgatacaatctcttatcatgtgggtaatgttctcgatgtcgatagccatatgcccggtagttgcgatatacataaactgatcactaattccaaacccacccgctttttatagtaagtttttcacccataaataataaatacaataattaatttctcgtaaaagtagaaaatatattctaatttattgcatggtaaggaagtagaatcataaagaacagtactcaatcaatagcaattatgaaacaatatatcgtcctggcatgcatgtgcctgccagtcttcagcaatcatcctcatcctcatcctcgtgtacggaagaagaaaacaaacatcatatgggaatcgatgttattatcaaagtcacaaagcaagaccaaacaccgaccaatgataagatttgccaatccgtaacggaaattacagagtccgagtcagatccaaatcccgaggtggaatcagaagatgattccacatcagtcgaggatgtagatcctcctaccacttattactccatcatcggtggaggtctgagaatgaactttggattcaccaaatgtcctcagattaaatccatctcagaatccgctgatggaaacacagtgaatgctagattgtccagcgtgtccccaggacaaggtaaggactctcccgcgatcactcatgaagaagctcttgctatgatcaaagactgtgaggtgtctatcgacatcagatgtagcgaagaagagaaagacagcgacatcaagacccatccagtactcgggtctaacatctctcataagaaagtgagttacgaagatatcatcggttcaacgatcgtcgatacaaaatgtgtcaagaatctagagtttagcgttcgtatcggagacatgtgcaaggaatcatctgaacttgaggtcaaggatggattcaagtatgtcgacggatcggcatctgaaggtgcaaccgatgatacttcactcatcgattcaacaaaactcaaagcgtgtgtctgaatcgataactctattcatctgaaattggatgagtagggttaatcgaacgattcaggcacaccacgaattaaaaaagtgtaccggacactatattccggtttgcaaaacaaaaatgttcttaactacattcacaaaaagttacctctcgcgacttcttctttttctgtctcaatagtgtgatacgattatgacactattcctattcctattcctatttcctttcagggtatcacaaaaatattaaacctctttctgatggtctcataaaaaaagttttacaaaaatatttttattctctttctctctttgatggtctcataaaaaaagttttacaaaaatatttttattctctttctctctttgat

SEQ ID NO: 87 - DNA, 201134 bp, Vaccinia virus
  source 1..201134: mol_type = genomic DNA
  misc_feature 1..201134: note = VIR111
atcaaagagagaaagagaataaaaatatttttgtaaaactttttttatgagaccatcaaagagagaaagagaataaaaatatttttgtaaaactttttttatgagaccatcagaaagaggtttaatatttttgtgataccctgaaaggaaataggaataggaataggaatagtgtcataatcgtatcacactattgagacagaaaaagaagaagtcgcgagaggtaactttttgtgaatgtagttaagaacatttttgttttgcaaaccggaatatagtgtccggtacacttttttaattcgtggtgtgcctgaatcgttcgattaaccctactcatccaatttcagatgaatagagttatcgattcagacacacgctttgagttttgttgaatcgatgagtgaagtatcatcggttgcaccttcagatgccgatccgtcgacatacttgaatccatccttgacctcaagttcagatgattccttgcacatgtctccgatacgaacgctaaactctagattcttgacacattttgtatcgacgatcgttgaaccgatgatatcttcgtaactcactttcttatgagagatgttagacccgagtactggatgggtcttgatgtcgctgtctttctcttcttcgctacatctgatgtcgatagacacctcacagtctttgatcatagcaagagcttcttcatgagtgatcgcgggagagtccttaccttgtcctggggacacgctggacaatctagcattcactgtgtttccatcagcggattctgagatggatttaatctgaggacatttggtgaatccaaagttcattctcagacctccaccgatgatggagtaataagtggtaggaggatctacatcctcgactgatgtggaatcatcttctgattccacctcgggatttggatctgactcggactctgtaatttccgttacggattggcaaatcttatcattggtcggtgtttggtcttgctttgtgactttgataataacatcgattcccatatgatgtttgttttcttcttccgtacacgaggatgaggatgaggatgattgctgaagactggcaggcacatgcatgccaggacgatatattgtttcataattgctattgattgagtactgttctttatgattctacttccttaccatgcaataaattagaatatattttctacttttacgagaaattaattattgtatttattatttatgggtgaaaaacttactataaaaagcgggtgggtttggaattagtgatcagtttatgtatatcgcaactaccgggcatatggctatcgacatcgagaacattacccacatgataagagattgtatcagtttcgtagtcttgagtattggtattactatatagtatatagatgtcgacgctagatatacagtcgcccactagagttactgtctccgaatgcggcatgataccgtcatcattctttgctttcgttaactgtttggaggaagaatctttgttattgcatttaatctcgaaattcagagtgcacacctttctcctgtaaagaaacctgaagttgctaccttattaaggacagagaagtattcctcacgaaatacgggattacagtctttatgattcatagtaatagttagttccgacgttgagatggattcactgagaccggtagtggtcgtccgagtacacgacgtgtcgttgacgggatacagattaatttccacatcgatatagttaaaggtattactgggtacgggttcgcatttatctgcggaagagacggtgtgagaatatgttccgagaccacacggagaacagatgacgtctccggatactccgtatcctattccacattttgtttgggaaacacatgccttgcatccggatgatcctttgagaagacaataatatccgggagagcattcacagattctattgtgagtcgtgttacacgatcgcgtcttccgttacaacttagacaagcgggtaaatgattattgcgagatgtgaaggtacccgaaccacagggtgtacatcgtgtgttagtcttgctatcgcataatctggaagcgtatgttcccggacacaaattatggcgtttgtattcgttgtctttacactttccatcggatggtgcatgcggtgctatatctcttccgtttattattatacatgagagaaacaatatatacgagtataatacggacttcatgatttaataatgtagtaatcgtcgtcttgttcctgtttcctacttctccaatcatatagatattttctttctatcatggataatatttgtaatggttctttccgtacaacatactgtttagatgatattgcgcataatttccggaggcaaatacgatagtctagattgaccgatggtagactctaatttattgagtgctttgtcgacgagtttacttttatgctccatcgatagatggcactgttctatgagatcgtcgtacatgggaaatgaaatgtgtctgtccgaatgtatggctttaagatagctgtgataccgtatacaggtcggtgtcggagattcgaatctctttaaggcgacttatgtcacgatgatggaatctatcttatcgaatgatatatttttcataaatacacttttatagtcctcgtttaaacagaatttactatgtagttccgcgaatgactcgtcccttaataggcagtaggctagtatcttttttacgtagtaatcgtcgtagggagagaattctgacatcttgtagaacaacgatttaatcataggtagagatactttcagtctgtggtggatgatgtcattcacaacatccgccttgtatatgatgtttctgttttcaaacaccaagtcgaataccgtctttagtcggaaggttgatgtcgtatccgatgtatgaggcaacattgttgttacaattttgaaaggcggtattatagtattcgtctttctgaatgtcgaacctatctagtagataccgtagtatattgagagtgtatccttgattatgttttatgaatagataaagtagatgttgtccttcttccttttgttcgtgccaattgagtaacattatgagaatatgacctgttgcacaatcgttccatgatgggtgtacaatcaagattattacgtatcctcgtatcggctcctcgagataaaagagcatacaccacacgaggactatgtttggtatactgttgaaggtaagtgtgtaaccgcgttaatgtttgctccataatctattatcgcgtagatgaatcgcttctcggctcgcatcttagtgtgacttaacttgtaataattgcttttgtagaacgtggatatgtgtttacagtagtaatgaagagaagtgagtccatcctcgtcgacgcaattagggtcggatcctttgtacagaacgtaatagtttaagctcccattgaatttatatctaagataacacagcaatagatcggatgatttactaaagtcatcaatggtgtccgttagtatatcaaagatcttgttatcgattgatagtgaatgaatcagatagtggtgtagaggaatatgtcctttttcatccttgctatcaaagttacgcatgccgtggtgtaacaatatctttaatacagatggattaaatcgtgtattcatcgtatagcaatgtaatggagagttacctcgtttattcagatcgcagtgtttaataactagcttaaacagatgagacgatgtatccacatcaaagaacgtaaaatacatatgacaaacattgttgacagaaacgtgaccttcattcttaccgtcgtccataaatacgttaggtatgtaccacatactgtcgcgaacgatgcgtacaatctcgtccatctcataatgatttactttttcataattaaagatgtgaaagaaaaccgaacaatatatttttttagtaatgtttatgcgagacatataaaataaactccgtgtttatgatgccggtaaatgtttttatcatcttggacggaatcgattttgtaatatgtcatggaaacaaatgaaacaggacattatcgctccatgataaattatttaatggagtaataaagtatctccatgggtaatttcgaaatcaagttatcgtctgtattaatgttgtccactatggagtcgatcctctcattgttctttacagtttctgtaatgatggacgttagttcttttttgtaccatttgatgtcggattctttgcgtatctcaatctgtggcgtttgcttcgtttaaataatatatcaaacatggagacgcctgatatgtaggcattcttcattctattaatgtctactctatagcgctttagttccttatgacgaccggagatatcatacttactttagaaggaaaatcatcatctaggattaaggcgtatctgatacaggcgaataatggttcaggatatagatagcgtatatctctattaaatgcgtcaatcatagtctctagagtgggatggtagctaagtaataaatcaactatcctcgttttgttttctcttctgtaactacttttctggatggccgtattgattatcgagcgtgatgttgtaacactcgctccatattccaataaccgctttgcaaattgtatattattgacatcgaccgcgtaatatagtagagttttattctcattatcgatcatatctatattatccatgtacttgcttagtatatcaaatacatctattagtatggtttcataacagtgatacccgcaattattaaatctcgataatatcagaccgtacatacatagacggccattgttcgatacgtgatttacagccatgtgtccattattttccacgataaaccttacgacgtttacatcgacgagattattattaacaaagtagtcgtgcagaggatagttgttgtccgttatctaacatgcatcgaacgaccatatcgccgtaatgtaagtagtttatcaacatggcttgtacgatggattcatcctgttgtctaaatctctttagaatgttatcgatgatgtagtggttatagtctctggaatcgtaagaagtaatactacgcattacgtcgacaagagtatgacgtctctcaataagaagattaacgatttccatgtctacattatatggggttactctaaatcgcttgtttagataatccgcctctaatatagggctgacgtcgtatactctacacgtgtccacatcctttattaataatttaacaatctctatatctatggttgagcaagaccagtagtattggatgggtaaagatcctccttcgtctctgccatggatggaaacattgttattgatcaaacatttaattacatccttggatagagattgagattctctatgagacgatatatagtaatgaagagagttcttacacatatcactgtcgtacatacaggtacgaaatacgtaaccggtgctgtaacattctgatttaagaagccatagcaatacttctggtctcggattaggcgtcgttacgtatatatccaccaatccgagaccattgattgcataattcgtattcttggacggacgtatccgtttatccacaattaggtattttagcagacgtaagtcgatattatccgaagacatatacgaatacagatcgaaatcatttatattcgacttgagttcgttagaggaattcgaatagctggatatcagtagatgcacaatttgagattttacgtatctatgcttactgtatgctcctagcggagttaatccttcgttgtttctacaaagtctctcgactccgcgagagagtaacagtcgaacaatcttaatgtctgtatcgcatttattgaagacgtaacaatgtagcgcattgtttcctcgtctatctatatgttttgataagttgtgacacgtttcaatttctagttttatttttttgtacgtcacatcttcatccagtagacgacatagaatacatgtgcaatccatagctattctggtgctaattattcctatttcacgaaaaatgatgaaggcaatcattcctcataagatgataaaaagtgtagtgagagagcatgaaggagatttagtatttagcagtgcggatatgatccaagagggtgagatagtcgttctcgttcagaatctttcgcagcataagtagtatgtcgatatacttatcgttgaagactcttccagagacgatagctgattgagtacaaagtccaatgattgcacgaagttcttcggcggttttcatggagtcatttctgatgaaacatttaatgatctccacgcaattgtcgatattgtcccacggaagtgaatccttcaactcaccaccaaagagctccgttgcatcagttctgaaagagatgagaagcctgtagagagaccctgcgctttctctatgggtccatctatgagaaacccacaggatgtattcagtcagacaatgtctgacgtcggccacggtattcagggagtccttagtagcgtggcaatgacagggtctgaactgggcacaaggagaggccattgtaaaggtagacctgtagccgtttatgctaatagagggctttaatttccatttttttaatgggttgtggatgaggaatgagagtgatatcatattgagatacgtagttatgtagaggtgtatttcctatattatttactttcggtttcatattttaccaactctttaataaatttcttttcacgatgcatcttattaaatgacgttttctcataagtggacatatagatgcagaagtaatgaagaaaagtattacctctatcatctacataattagggtctgctcctttttttaacaacttatacagtacgtagtagtagtttatcggttttaaatcaagtctagaatatatagtggattaatatatttttatattagctaaagctatctatactatcagaaagcatatcattctcaacttcatcatgagttaaatatttgtgtaatggatgtcatgaacattaaacgtattcatgacatactcctttaataggttttttaaaacagatgattcaaatccttcattcattagataacagtgtaacggagtcgtaccttctactagtttgtttatatcacagcattctacaaacagtctaaacaatagagaagacggacagactttaacgtataaatgacacatgttatcgatattcgttgatgaattattattaaacgtagttatgataaatgattctaacgacatctctcgctagagataaaatctagtatcgtatcattaaacatctttgcatcatactcgcatagcatagtttttcataattaatacaatatttaaaagacttattcggaaagtattttaatacatgtatcatcgatggagatccatatgaggagtcacttgtagttcttcagtagtaataacagtgctatcatcgatagtataattatatgtagaaggttcatatgttgttgtaattggagtaactgttggtagttcttccgtggaatcaataattatactaacagcaatagtataattatataaatatgttccgttgatatcacatattttaatgaactcatttctaacaccctcagctatatctgtccaattaaatgtagccaacaatctactacgttctctttgattgactacttgtacggtagcgacgctacactatctttattgtcttctacatgctccaattgaatgtcatgatacaacgcagtttttcttatgcatgtttcataacaccacgaacatgtcgcagtaagatatatagccagagataatttctgtaaattcatgattgccggtcataaacaagcccgtcaataattgtggctatatattcagtttatagagcaaaataattaagcacaatagcgcttaatctcaaaatatgttatgtttatttttttcatattaaacatactggttaaaatcctctaaaggctgatcttcatctataaatcaagatcataattacatttagacagtggtttcatgtttataaaaatgttctttttgtgtgaataaggaatatactaatcaataatcaaccatcgaccccattacgatagtatgcaggcaaccccccattagagaggtacgtgtaatcagtctctccagttttagtatttttataagtcattgttacataaacggcttttaaacagtctcctcgataataagccatatctggaaatttattaaatactcgagtcattttacgcacggtcaaaaaagtaagtaatgtcgacgacttcttacattctatagaaacacctagaatactcattttcttttggaaaatatcctcagactctgatttgaacaatgcacgacctatagtaaaccgtgaccaataagttatattagtcaatggtatatccaaaccatcaggtgtggatagtacgccgatagtccagtctttggtatcgatagtgtagttattgaactgagaagttaccgtatagtctttttggtcatctctaaacaaggaaactaatacctctacactattgaacgatttatcttccgtaatgggtggaataacgggaatataaagtggactagcgatggatgaagtcacgaatataagacacgctattaatccgtatatcatcattttgatattacttataataacgatttgtttaatttttagtttatactattaattgtaaatgatattattatttttttaagtattatcagctttagtttatactattactatttgtaatatttagacatagataaacgtgataaaagtctatttgtttatatttattgcggatagcagtatttccctataaaaagtatacgtcctgtgttgtctttaatcatgtacatgaatggatggtttatgtagaccttcgtacgatataccatcgaaaagttagtcataaatactcctgtaacggccgatgcttctgtatactcctcattaacatctataaacgtcgtatgtagaaatttttctacagtgatagtttcattacacatcttgctaaaatctgcataatatccgaatatattagtaagtcctaaattttctaaaatcggtaccagattatacggttctgtcatttccactttaaactttggcatatacaagtctatacttttagtagataacataccacaccattttttaaatttttcatctgttatatttttttctatgttatatataccttctatgtcgtccggtagtataattaccatactagagtttccctcgtatggaatatcgataatagagaatcctccgaataattcattaatatgtacatattgcaagttattctcggtacccaccatcatatcaacactggtaactatattcttagaaatataaaacttgtctgtatatgtaagatgtttagaaaatggatatttccacattgctttaaaatggacggcgctaacaactgtcatacgagtattaatggatagcggactagtcaataaggaattaattttaccatttgtcatcgtcttaacccattcgttgattagttcctttgtttggttagcattattaaagtttacagtttgaaaatcgtcttttattttttgtaggaaggaggcgtggaactcgatactatcgctaccgtatattttatttgcggtagctagtgtcgcacaatacggaatatctacgtccatgtcattattgtcatccttcttatcatcgggtgtattctcattcatattctctatatattttgatagttgttcagctgtagaaccagctgctccatgatttagaatagataaagtagataaaatagaaactggagaaatcaaaacattttcatcagggtgttttaagattagttctttaaagatatccatggtatagaccaaacaataacgataacgatatatatcataaataaataatgttaaatttcagtttatgtttgtaccccgtattcatacttaacaaattggtattgcgtacacaatcaatcatattacataccattaataatgcaagcataaaaaatcgttagtagatgtttctaaatataggttccgtaagcaaagaatataagaatgaagcggtaatgataaaatcaatcgttatctaaaatgatcatactcatttattttattctattatattaacacatacatttttaacagcaacacattcaatattgtattgttatttttatattatttacacaattaacaatatattattagtttatattactgaattaataatataaaattcccaatcttgtcataaacacacactgagaaacagcataaacacaaaatccatcaaaaatgtcgatgaaatatctgatgttgttgttcgctgctatgataatcagatcattcgccgatagtggtaacgctatcgaaacgacattgccagaaattacaaacgctacaacagatattccagctatcagattatgcggtccagagggagatggatattgtttacacggtgactgtatccacgctagagatatcgacggtatgtattgtagatgctctcatggttatacaggcattagatgtcagcatgtagtattagtagactatcaacgttcagaaaaaccaaacactacaacgtcatatatcccatctcccggtattgtgcttgtattagtaggcattattattatgtgttgtctattatctgtttataggttcactcgaagaactaataaactacctctacaagatatggttgtgccataatttttataaatttttttatgagtatttttacaaaaaaaatgtataaagtgtatgtcttatgtatatttataaaaatgctaagtatgcgatgtatctatgttatttgtatttatctaaacaatacctctacctctagatattatacaaaaattttttatttcggcatattaaagtaaaatctagttaccttgaaaatgaatacagtgggtggttccgtatcaccagtaagaacataatagtcgaatacagtatccgattgagattttgcatacaatactagtctagaaagaaatttgtaatcattttctgtgacgggagtccatatatctgtatcatcgtctagtttatcagtgtcccatgctatatttctgttatcatcattagttaatgaaaataactctcgtgcttcagaaaagtcaaatattgtatccatacatacatctccaaaactatcgcttatacgtttatctttaacgatacctatacctagatggttatttactaacagacattttccagatctattgactataactcctatagtttccacatcaaccaagtaatgatcatctattgttatataacaataacataactcttttccatttttatcagtatgtatatctatatcaacgtcgtcgttgtagtgaatagtagtcattgatctattatatgaaacggatatgtctagaacggcaattgtcttacgtccagttaacactttcgttgatttaaagtctagagtctttgcaaacataatatccttatccgactttatatttcctgtagggtggtataattttattttgcctccacatatcggtgtttccaaatatattactagacaatattccatatagttattagttaagggtacccaattagaacacgtacgcttattatcatcatttggatcgtatttcataaaagttattgtactatcgatgtcaacacattctacattttttaatcgtctatatagtatttttctgatattttctataatatcagaattgtcttccatcggaagttgtatactatcggaatcagttacatgtttaaataattctctgatgtcattccttatacaatcaaattcattattaaacagtttaatagtctgtagacctttatcgtcgtaaatatccattgtcttattagttacgcttatttttatgtgttttacgttgctttattatattttataagaatgattgtttgacgaatcacgagaactattaagacacattattaggtatatattataaaaaagtttttgattacgatgttataagaggaaagaggacacattaacatcatacatcaattaactacattcttataacatcgtaatcaaaagaattgcaattttgatgtataacaactgtcaatgggttatggaattgtatattacatattatacggtatgttggtaacgacaaataccgatcggtaatcgtttgccggtgtaatagaattatatatatctatctattacaccggctgagtatacataataataagttgtggtagtatgatctccatatttataatttaggactttgtattcagtatttttggaatcataaaaaataaaaaaaagttttactaatttaaaatttaaaaagtatttacatttttttcactgtttagtcgcggatatggaattcgatcctgccaaaatcaatacatcatctatagatcatgtaacaatattacaatacatagatgaaccaaatgatataagactaacagtatgcattatccgaaatattaataacattacatattatatcaatatcacaaaaataaatacacatttggctaatcaatttcgggcttggaaaaaacgtatcgccggaagggactatatgactaacttatctagagatacaggaatacaacaatcaaaacttactgaaactatacgtaactgtcaaaaaaatagaaacatatatggtctatatatacactacaatttagttattaatgtggttattgattggataaccgatgtgattgttcaatcaatattaagagggttggtaaattggtacatagctaataatacctatactccaaatacacccaataatacaacaaccatttctgagttggatatcatcaaaatactaaataaatacgaggacgtgtatagagtaagtaaagaaaaagaatgtggaatttgctatgaagttgtttactcaaaacgattagaaaacgatagatactttggtttattggattcgtgtactcatatattttgcataacatgcatcaatatatggcataaaacacgaagagaaaccggtgcgtcggataattgtcctatatgtcgtacccgttttagaaacataacaatgagcaagttctataagctagttaactaataaataaaaagtttaatttgttgacgacgtatgtcgttattttttctcgtataaaagattaatttgattctaatataatctttagtattggataaatatcaattcaaattaattccattagattatatcataaataaaaatagtagcacgcactacttcagccaaatattcttttttgaaacgccatctatcgtagtgaggacacaagtgaacctataatgagcaaatttattagtatcggttacatgaaggactttacgtagagtggtgattccactatctgtggtacgaacggtttcatcttctttgatgccatcacccagatgttctataaacttggtatcctcgtccgatttcatatcctttgccaaccaatacatatagctaaactcaggcatatgttccacacatcctgaacaatgaaattctccagaagatgttacaatgtctagatttggacatttggtttcaaccgcgttaacatatgagtgaacacacccatacatgaaagcgatgagaaataggattttcatcttgccaaaatatcactagaaaaaatttatttatcaattttaaaggtataaaaaatacttattgttgctcgaatattttgtatttgatggtatacggaagattagaaatgtaggtattatcatcaactgattctatggttttatgtattctatcatgtttcactattgcgttggaaataatatcatatgcttccacatatattttattttgttttaactcataatactcacgtaattctggattattggcatatctgtgaataattttagctccatgatcagtaaatattaatgagaacatagtattaccacctaccattatttttttcatttcgttcaattcttgattgcaaagatctatataatcattatagcgttgacttatggactctggaatcttagacgatgtacagtcatctataatcatggcatatttaatacattgttttatagcatagtagttatctacgatgttagatatttctctcaatgaatcaatcacacaatctaatgtaggtttatgacataatagcattttcagcagttcaatgtttctagattcgttgatggcaatggctatacatgtatatccgttatttgatctaatgttgacatctgaaccggattctagcagtaaagatactagagattgtttattatatctaacagccttgtgaagaagtgtttctcctcgtttgtcaatcatgttaatgtctttaagataaggtaggcaaatgtttatagtactaagaattgggcaagcataagacatgtcacaaagaccctttttgtatgtataagtgtagaaattataacatccatagttggatttacataggtgtccaatcgggatctctccatcatcgagatgattgacggcatctcccccttccttttttagtagatatttcatcgtgtaagaatcaatattaatatttctaaagtatccgtgtatagcctctttatttaccacagctccatattccaacatgcattccactaaagggatatcgatatcgccgaatgtcatatactcaattagtatatgttggaggacatccgagttcattgttttcaatatcaaagagatggtttccttatcatttctccatagtggtacaatactacacattattccgtgaggctttccattctccaaaaacaatttgaccaaatctacatctttattgtatctataatcactatttagataatcagccataattcctcgagtgcaacatgttagatcgtctatatatgaataagccgtgttatctattcctttcattaacaatttaacgatgtctatatctatatgagatgacttaatataatattgaagagctgtacaatagtttttatctatagaagacggcttgattccgtgattaattagacatttaacaacttccggacgcacatatgctctcgtatccgactctgaatacagatgagagatgatatacagatgcaatacggtaccgcaatttcgtagttgataatcatcatacgcgtatccgtactcgtcctcataaagaacactgcagccattttctatgaacaaatcaataattttaggaacaggatcattgtcattacataattttctataactgaacgatggttttcacatttaacactcaagtcaaatccatgttctaccaacacctttatcaagtcaacgtctacatttttggatttcatatagctgaatatattaaagtcatttatgttgctaaatccagtggcttctagtagagccatcgctatatcctttaactttaacatgtctactatttgtgtattcttctaatggggtagctgtctccaatttttgcgtaatggattagtgccactgtctagtagtagtttgacgacctcgacattattacaatgctcattaaaaaggtatgcgtgtaaagcattattcttgaattggttcctggtatcattaggatctctgtctctcaacatctgtttaagttcatcgagagccacctcctcattttccaaatagtcaaacattttgactgaatagaagtgaatgagctactgtgaactctatacacccacacaactaatgtcattaaatattatttttttgaatgtatttataccatgtcaaaaacttgtacaattattaataaaaataatttagtgtttaaattttaccagttccagattttacacctccgttaaccccactttttacaccactggacgaccctcctccccacattccaccgccaccagatgtataagttttagatcctttattactaccatcatgtccatggataaagacactccacatgccgccactaccccctttagaagacatattaataagacttaagagttaaggacaagtttaacaataaaattaatcacgagtaccctactaccaacctacactattatatgattatagtttctatttttacagtaccttaactaaagtttctagtcacaagagcaatactaccaacctacactattatatgattatagtttctatttttataggaacgcgtacgagaaaatcaaatgtctaatttctaacggtagtgttgataaacgattatcgtcaatggatacctcctctatcatgtcgtctattttcttactttgttctattaacttattagcattatatattatttgattataaaacttatattgcttattagcccaatctgtaaatatcggattattaacatatcgtttctttgtaggtttatttaacttgtacatcactgtaagcatgtccgtaccatttattttaatttgacgcatatccgcaatttctttttcgcagtcggttataaattctatatatgatggatacatgctacatgtgtacttataatcgactaatatgaagtacttgatacatattttcagtaacgatttattattaccacctatgaataagtacctgtgatcgtctaggtaatcaactgttttcttaatacattcgatggttggtaatttactcagaataatttccaatatcttaatatataattctgctatttctggaatatatttatctgccagtataacacaaatagtaatacatgtaaacccatattttgttattatattaatgtctgcgccattatctattaaccattctactaggctgacactatgcgacttaatacaatgataaagtatactacatccatgtttatctattttgtttatatcatcaatatacggcttacaaagttttagtatcgataacacatccaactcacgcatagagaaggtagggaataatggcataatatttattaggttatcatcattgtcattatctacaactaagtttccattttttaaaatatactcgacaactttaggatctctattgccaaatttttgaaaatatttatttatatgcttaaatctatataatgtagctccttcatcaatcatacatttaataacattgatgtatactgtatgataagatacatattctaacaatagatcttgtatagaatctgtatatcttttaagaattgtggatattaggatattattacgtaaactattacacaattctaaaatataaaacgtatcacggtcgaataatagttgatcaactatataattatcgattttgtgatttttcttcctaaactgtttacgtaaatagttagatagaatattcattagttcatgaccactatagttactatcgaataacgcgtcaaatatttcccgtttaatatcgcatttgtcaagataataatagagtgtggtatgttcacgataagtataataacgcatctctttttcgtgtgaaattaaatagtttatcacgtccaaagatgtagcataaccatcttgtgacctagtaataatataataatagagaactgttttacccattctatcatcataatcagtggtgtagtcgtaatcgtaatcgtctaattcatcatcccaattataatattcaccagcacgtctaatctgttctattttgatcttgtatccatactgtatgttgctacatgtaggtattcctttatccaataatagtttaaacacatctacattgggatttgatgttgtagcgtatttctctacaatattaataccatttttgatactatttatttctatacctttcgaaattagtaatttcaataagtctatatcgatgttatcagaacatagatattcgaatatatcaaaatcattgatatttttatagtcgactgacgacaataacaaaatcacaacatcgtttttgatattattatttttcttggtaacgtatgcctttaatggagtttcaccatcatactcatataatggatttgcaccactttctatcaatgattgtgcactgctggcatcgatgttaaatgttttacaactatcatagagtatcttatcgttaaccatgattggttgttgatgctatcgcattttttggtttctttcatttcagttatgtatggatttagcacgtttgggaagcataagctcatatgatttcagtactgtagtgtcagtactattagtttcgatcagatcaatgtctagatctatagaatcaaaacacgataggtcagaagataatgaatatctgtaggcttcttgttgtactgtaacttctcgttttgttagatggttgcatcgtgctttaacatcaatggtacaaattttatcctcgctttgtgtatcatattcgtccctactataaaattgtatattcagattatcatgagatgtgtatacgctaacggtatcaataaacggagcacaccatttagtcataaccgtaatccaaaaatttttaaagtatatcttaacgaaagaagttgtgtcattgtctacggtgtatggtactagatcctcataagtgtatatatctagagtaatgtttaatttatcaaatggttgataatatggatcctcatggcaatttcctaagacgaaaataagacataaacacgcaataaatctaattgcggacatggttactccttaaaaaaatactaataatcaccttggctatttagtaagtgtcatttaacactatactcatattaatccatggactcataatctctatacgggattaacggatgttctatatacggggatgagtagttctcttctttaactttatactttttactaatcatatttagactgatgtatgggtaatagtgtttgaagagctcgttctcatcatcagaataaatcaatatctctgtttttttgttatacagatgtattacagcctcatatattacgtaatagaacgtgtcatctaccttattaactttcaccgcatagttgtttgcaaatacggttaatcctttgacctcgtcgatttccgaccaatctgggcgtataatgaatctaaactttaatttcttgtaatcattcgaaataatttttagtttgcatccgtagttatcccctttatgtaactgtaaatttctcaacgcgatatctccattaataatgatgtcgaattcgtgctgtatacccatactgaatggatgaacgaataccgacggcgttaatagtaatttactttttcatctttacatattgggtactagttttactatcataagtttataaattccacaagctactatggaataagccaaccatcttagtataacacacatgtcttaaagtttattaattaattacatgttgttttatatatcgctacgaatttaaacagagaaatcagtttaggaaaaaaaattatctatctacatcatcacgtctctgtattctacgatagagtgctactttaagatgagacatatccgtgtcatcaaaaatatactccattaaaatgattattccggcagcgaacttgatattggatatatcacaacctttgttaatatctacgacaatagacagcagtcccatggttccataaacagtgagtttatctttctttgaagagatattttgtagagatcttataaaactgtcgaatgacatcgcatttatatctttagctaaatcgtatatgttaccatcgtaatatctaaccgcgtctatcttaaacgtttccatcgctttaaagacgtttccgatagatggtctcatttcatcagtcatactgagccaacaaatataatcgtgtataacatctttgatagaatcagactctaaagaaaacgaatcggctttattatacgcattcatgataaacttaatgaaaaatgtttttcgttgtttaagttggatgaatagtatgtcttaataattgttattatttcattaattaatatttagtaacgagtacactctataaaaacgagaatgacataactaatcataactagttatcaaagtgtctaggacgcgtaattttcatatggtatagatcctgtaagcattgtctgtattctggagctattttctctatcgcattagtgagttcagaatatgttataaatttaaatcgaataacgaacataactttagtaaagtcgtctatattaactcttttattttctagccatcgtaataccatgtttaagatagtatattctctagttactacgatctcatcgttgtctagaatatcacatactgaatctacatccaattttagaaattggtctgtgttacatatctcttctatattattgttgatgtattgtcgtagaaaactattacgtagaccattttctttataaaacgaatatatagtactccaattatctttaccgatatatttgcacacataatccattctctcaatcactacatctttaagattttcgttgttaagatatttggctaaactatataattctattagatcatcaacagaatcagtatatatttttctagatccaaagacgaactctttggcgtcctctataatattcccagaaaagatattttcgtgttttagtttatcgagatctgatctgttcatatacgccatgattgtacggtacgttatgataaccgcataaaataaaaatccattttcatttttaaccaatactattcataattgagattgatgtaatactttgttactttgaacgtaaagacagtacacggatccgtatctccaacaagcacgtagtaatcaaatttggtgttgttaaacttcgcaatatttatcaatttagatagaaacttatactcatcatctgttttaggaatccatgtattattaccactttccaacttatcattatcccaggctatgtttcgtccatcatcgttgcgcagagtgaataattcttttgtattcggtagttcaaatatataatccatgcatagatcggtaaagctattgtagatgtgatttttcctaaatctaatataaaactcgtttactagcaaacactttcctgatttatcgaccaagacacatatggtttctaaatctatcaagtggtggggatccatagttatgacgcagtaacatagattattaccttcttaactgtcgctaatatctatatatttattgttatcgtattggattctgcatatagatggcttgtatgtcaaagatatagaacacataaccaatttatagtcgcgctttacattctcgaatctaaagttaagagatttagaaaacattatatcctcggatgatgttatcactgtttctggagtaggatatattaaagtctttacagatttcgtccgattcaaataaatcactaaataatatcccacattatcatctgttagagtagtatcattaaatctattatattttatgaaagatatatcactgctcacctctatatttcgtacatttttaaactgtttgtataatatctctctgatacaatcagatatatctattgtgtcggtagacgataccgttacatttgaattaatggtgttccattttacaacttttaacaagttgaccaattcatttctaatagtatcaaacgctccatgattaaatattttaatagtatccattttatatcactacggacacaaagtagctgacataaaccattgtataatttttatgttttatgtttattagcgtacacattttggaagttccggcttccatgtatttcctggagagcaagtagatgatgaggaaccagataggttatatccgtacttgcacttaaagtttacattgtcgttgtatgagtatgatcttttaaacccgctagacaagtatccgtttgatattgtaggatgtggacatttaacaatctgacacgtgggtggatcggaccattctcctcctgaacacaggacaccagagttaccaatcaacgaatatccactattgcaactataagttacaacgcttccatcggtataaaaatcctcgtatccgttatgtcttccgttggatatagatggaggggattggcatttaacagattcacaaataggtgcctcgggattccataccatagatccagtagatcctaattcacaatacgatttagattcaccgatcaaatgatatccgctattacaagagtacgttatactagagccaaagtctactccgccaatatcaagttggccattatcgatatctcgaggcgatgggcatctccgtttaatacattgattaaagagtgtccatccagtacctgtacatttagcatatataggtcccattttttgctttctgtatccaggtagacatagatattctatagtgtctcctatgttgtaattagcattagcatcagtctccacactattcttaaatttcatattaatgggtcgtgacggaatagtacagcatgatagaacgcatcctattcccaacaatgtcaggaacgtcacgctctccaccttcatatttatttatccgtaaaaatgttatcctggacatcgtacaaataataaaaagcccatatatgttcgctattgtagaaattgtttttcacagttgctcaaaaacgatggcagtgacttatgagttacgttacactttggagtctcatctttagtaaacatatcataatattcgatattacgagttgacatatcgaacaaattccaagtatttgattttggataatattcgtattttgcatctgctataattaagatataatcaccgcaagaacacacgaacatctttcctacatggttaaagtacatgtacaattctatccatttgtcttccttaactatatatttgtatagataattacgagtctcgtgagtaattccagtaattacatagatgtcgccgtcgtactctacagcataaactatactatgatgtctaggcatgggagacttttttatccaacgatttttagtgaaacattccacatcgtttaatactacatatttttcatacgtggtataaactccacccattacatatatatcatcgtttacgaataccgacgcgcctgaatatctaggagtaattaagtttggaagtcttatccatttcgaagtgccgtgtttcaaatattctgccacacccgttgaaatagaaaattctaatcctcctattacatataactttccattgttaacacaagtactaacttctgattttaacgacgacatattagtaaccgttttccattttttcgtttcaagatctacccgcgatacggaataaacatgtctattgttaatcatgccgccaataatgtatagacaattatgtaaaacatttgcattatagaattgtctatctgtattaccgactatcgtccaatattctgttctaggagagtaatgggttattgtggatatataatcagagtttttaatgactactatattatgttttataccatttcgtgtcactggctttgtagatttggatatagttaatcccaacaatgatatagcattgcgcatagtattagtcataaacttgggatgtaaaatgttgatgatatctacatcgtttggatttttatgtatccactttaataatatcatagctgtaacatcctcatgatttacgttaacgtcttcgtgggataagatagttgtcagttcatcctttgataattttccaaattctggatcggatgtcaccgcagtaatattgttgattatttctgacatcgacgcattatatagttttttaattccatatcttttagaaaagttaaacatccttatacaatttgtggaattaatattatgaatcatagtttttacacatagatctactacaggcggaacatcaattattatggcagcaactagtatcatttctacattgtttatggtgatgtttatcttcttccagcgcatatagtctaatagcgattcaaacgcgtgatagtttataccattcaatataatcgcttcatcctttagatggtgatcctgaatgcgtttaaaaaaattatacggagatgccgtaataatttccttattcacttgtataatttccccattgatagaaaatatcacgctttccattcttgaagtactataagtaattatagtataatgtaaaggtttatatattcaatattttttataaaaaaatcatttcgacattaattcctttttaaatttccgtctatcatctatagaaacatattctatgaatttataaaatgcttttacgtgtcctatcgtaggcgatagaaccgctaaaaagcctattgaatttctacaaaagaatctattatatggtatagggagagtataaaacattaaatgcccgtacttattaaagtattcagtagccaatcctaactctttcgaatacttattaatggctcttgttctgtacgaatctatttttttgaacaacggacctagtggtatatcttgttctatgtatctaaaataatgtctgactagatccgttagtttaatatcctcagtcatcttgtctagaatggcaaatctaactgcgggtttaggctttagtttagtttttatatctacatctatgtctttatctaacaccaaaaatataatagctaatattttattacaatcatccggatattcttctacgatctcactaactaatgtttctttggttatactagtatagtcactatcggacaaataaagaaaatcagatgatcgatgaataatacatttaaattcatcatctgtaagatttttgagatgtctcattaaaatattattagggtcagtactcattatcattaggcagctattacttattttattatttttcaccatatagatcaatcattagatcatcaaaatatgtttcaatcatcctaaagagtatggtgaatgactcttcccatctaatttctgaacgttcaccaatgtctctagccactttggcactaatagcgatcattcgcttagcgtcttctatattattaactggttgattcaatctatctagcaatggaccgtcggacagcgtcattctcatgttcttaatcaatgtacatacatcgccgtcatctaccaattcatccaacaacataagctttttaaaatcatcattataataggtttgatcgttgtcatttctccaaagaatatatctaataagtagagtcctcatgcttagtaatttaactattttagttaacaactattttttatgttaaatcaattagtacaccgctatgtttaatacttattcatattttagtttttaggattgagaatcaatacaaaaattaatgcatcattaattttagaaatacttagtttccacgtagttaatgaaacatttgaactcatcgtacaagacgttctcgtacaggacgtaactataaaccggtttatatttgttcaagatagatacaaatccgataactttttttacgaattctacgggatccactttaaaagtgtcataccgggttctttttatttttttaaacagatcaatggtgtgatgttgattaggtcttttacgaatttgatatagaatagcgtttacatattctccataatggtcaatcgccatttgttcgtatgtcataaattctttaattatatgacactgtgtattgtttagttcatccttgttcattgttaggaatctatccaaaatggcaattatactagaactataggtgcgttgtatacacatattgatgtgtctgtttatacaatccatgatatttggatccatgctactaccttcgggtaaaattgtagcatcatataccatttctagtactttaggttcattattatccattgcagaggacgtcatgatcgcatcctaaaaaaatatattatttttatgttattttgttaaaaataatcatcgaatacttcgtaagatactccttcatgaacataatcagttacaaaacgtttatatgaagtaaagtatctacgatttttacaaaagtccggatgcataagtacaaagtacgcgataaacggaataataatagatttatctagtctatctttttctatagctttcatagttagatacatggtctcagaagtaggattatgtaacatcagcttcgataaaatgactgggttatttagtcttacacattcgctcatacatgtatgaccgttaactacagagtctacactaaaatgattgaacaatagatagtctaccattgtttcgtattcagatagtacagcgtagtacatggcatcttcacaaattatatcattgtctaatagatatttgacgcatcttatggatcccacttcaacagccatcttaaaatcggtaaaatcatattgctttcctttatcattaataatttctaaaacatcatctctatcataaaagatacaaatattaactgtttgatccgtaataacattgctagtcgatagcaatttgttaataagatgcgctgggctcaatgtcttaataagaagtgtaagaggactatctccgaatttgttttgtttattaacatccgttgatggaagtaaaagatctataatgtctacattcttgactgttttagagcatacaatatggagaggtgtatttccatcatgatctggttttgagggactaattcctagtttcatcatccatgagattgtagaagcttttggattgtctgacataagatgtctatgaatatgatttttgccaaatttatccactatcctggcttcgaatccgatggacattatttttttaaacactctttctgaaggatctgtacacgccaacaacggaccacatccttcttcatcaaccgagttgttaatcttggctccatactgtaccaataaatttattctctctatgacttcatcatctgttcccgagagataatatagaggcgttttatgctgtttatcacacgcgtttggatctgcgccgtgcgtcagcagcatcgcgactattctattattattaattttagaagctatatgcaatggataatttccatcatcatccgtctcatttggagagtatcctctatgaagaagttcttcgacaaatcgttcatctagtcctttaattccacaatacgcatgtagaatgtgataattatttccagaaggttcgatagcttgtagcatattcctaaatacatctaaatttttactattatatttggcataaagagatagataatactcggccgacataatgttgtccattgtagtataaaaattaatatttctatttctatttctgtatatttgcaacaatttactctctataacaaatatcataacttagttcttttatgtcaagaaggcactggtttagttcatctataaatgtcacgccataactaccacgcatgctatactcagaattatgataaagatatttatccttggggtgtaggtaatggggattaatctttgttggatcagtctctaagttaacacatgtcacacatgatccatttatagttatatcacacgatgatgatttatgaattgattccggaagatcgctatcgtattttgtggttccacaattcatttccatacatgttattgtcacactaatattatgatgaactttatctagccgctgagtggtaaacaacagaacagatagtttattatctttaccaacaccctcagccgctgccacaaatctctgatccgtatccatgatggtcatgtttatttctagtccgtatccagtcaacactatgttagcatttctgtcgatatagctttcactcatatgacactcaccaataatagtagaattaatgtcgtaatttacaccaatagtgagttcggcggcaaagtaccaataccggtaatcttgtcgaggaggacatatagtattcttgtattctaccgaatacccgagagatgcgatacaaaagagcaagactaatttgtaaaccatcttactcaaaatatgtaacaatagtacgatgcaatgagtaagacaataggaaatctatcttatatacacataattattctatcaattttaccaattagttagtgtaatgttaacaaaaatgtgggagaatctaattagtttttctttacacaattgacgtacatgagtctgagttccttgtttttgctaattatttcatccaatttattattcttgactatatcgagatcttttgtataggagtcagacttgtattcaacatgcttttctataatcattttagctatttcggcatcatccaatagtacattttccagattagcagaatagatattaatgtcgtatttgaacagagcctgtaacatctcaatgtctttattatctatagccaatttaatgtccggaatgaagagaagggaattattggtgtttgtcgacgtcatatagtcgagcaagagaatcatcatatccacgtgtccattttttatagtggtgtgaatacaactaaggagaatagccagatcaaaagtagatggtatttctgaaagaaagtatgatacaatacttacatcattaagcatgacggcatgataaaatgaagttttccatccagttttcccatagaacatcagtctccaatttttcttaacaaacagttttaccgtttgcatgttaccactatcaaccgcataatacaatgcagtgtttcccttgtcatcaaattgtgaatcatccagtccactgaatagcaaaatctttactattttggtatcttccaatgtggctgcctgatgtaatggaaattcattctctagaagatttttcaatgctccagcgttcaacaacgtacatactagacgcacgttattatcagctattgcataatacaaggcactatgtccatggacatccgccttaaatgtatctttactagagagaaagcttttcagctgcttagacttccaagtattaattcgtgacagatccatgtctgaaacgagacgctaattagtgtatattttttcattttttataattttgtcatattgcaccagaattaataatatctctaatagatctgattagtagatacatggctatcgcaaaacaacatatacacatttaataaaaataatatttattaagaaaattcagatttcacgtacccatcaatataaataaaataatgattccttacaccgtacccatattaaggagattccaccttacccataaacaatataaatccagtaatatcatgtctaatgatgaacacaaatggtgtattaaattccagtttttcaggagatgatctcgccgtagctaccataatagtagatgcctctgctacagttccttgttcgtcgacatctatctttgcattctgaaacattttataaatatataatgggtccctagtcatatgtttaaacgacgcattatctggattaaacatactaggagccatcatttcggctatcgacttaatatccctcttattttcgatagaaaatttagggagtttaagattgtacactttattccctaattgaaacgaccaatagtctaattttgcagccgtaatagaatctgtgaaatgggtcatattatcacctattgccaggtacatactaatattagcatccttatacggaaggcgtaccatgtcatattctttgtcatcgattgtgattgtatttccttgcaatttagtaactacgttcatcatgggaaccgttttcgtaccgtacttattagtaaaactagcattgcgtgttttagtgatatcaaacggatattgccatgtacctttaaaatatatagtattaatgattgcccatagagtattattgtcgagcatattagaatctactacattagacataccggatctacgttctactatagaattaattttattaaccgcatctcgtctaaagtttaatctatataggccgaatctatgatattgttgataatacgacggtttaatacacacagtattatctacgaaactttgataagttagatcagtgtacgtatatttagatgttttcagcttagctaatcctgatattaattctgtaaatgctggacccagatctctttttctcaaatccatagtcttcaataattctattctagtattacctgatgcaggcaatagcgacataaacatagaaaacgaatagccaaacggcgagaagacaatattatcatcttgaatatttttatacgctactataccggcattggtaaatccttgcagacgataggtagacgctgaacacgttaacgatagtatcaataacgcaatcatgattttatggtattaataattaaccttatttttatgttcggtataaaaaaattattgatgtctacacatccttttgtaattgacatctatatatccttttgtataatcaactctaatcactttaacttttacagttttccctaccagtttatccctatattcaacatatctatccatatgcatcttaacactctctgccaagatagcttcagagtgaggatagtcaaaaagataaatatatagagcataatccttctcgtatactctgccctttattacatcgcccgcattgggcaacgaataacaaaatgcaagcatcttgttaacgggctcgtaaattgggataaaaattatgtttttatatctattttattcaagagaatattcaggaatttctttttccggttgtatctcgtcgcagtatatatcatttgtacattgtttcatattttttaatagtttacaccttttagtaggactagtatcgtacaattcatagctgtattttgaattccaatcacgcataaaaatatcttccaattgttgacgaagacctaatccatcatccggtgtaatattaatagatgctccacatgtatccgtaaagtaatttcctgtccaatttgaggtacctatataggccgttttatcggttaccatatatttggcatggtttaccctagaatacggaatgggaggatcagcatctggtacaataaatagctttacttctatatctatgtttttagattttagcatagcgatagatcttaaaaagtttctcatgataaacgaagatcgttgccagcaactaatcaatagcttaacggatacttgtctgtctatagcggatcttcttaattcatcttctatataaggccaaaacaaaattttacccgccttcgaataaataatagggataaagttcataacagatacataaacgaatttactcgcatttctaatacatgacaataaagcggttaaatcattggttctttccatagtacatagttgttgcggcgcagaagcaataaatacagagtgtggaacaccacttacgttaatactaagaggatgatctgtattataatacgacggataaaagtttttccaattatatggtagattgttaactccaagataccagtatacctcaaaaatttgagtgagatccgctgccaagttcctattattgaagatcgcaatacccaattctttgacctgagttagtgatctccaatccatgttagcgcttcctaaataaatatgtgtattatcagatatccaaaattttgtatgaagaactcctcctaggatatttgtaatatctatgtatcgtacttcaactccggccatttgtagtctttcaacatcctttaatggtttgttagatttattgacggctactctaactcttactcctcttttgggtaattgtacaatctcgtttaatattatcgtgccgaaattcgtacccacttcatccgataaactccaataaaaagatgatatatctagtgtttttgtggtattggatagaatttccctccacatgttaaatgtagacaaatatactttatcaaattgcatacctataggaatagtctctgtaatcactgcgattgtattatccggattcattttatttgttaaaaaataatcctatatcacttcactctattaaaaatccaagtttctatttctttcatgactgattttttaacttcatccgtttccttatgaagatgatgtttggcaccttcataaatttttatttctctattacaatttgcatgttgcatgaaataatatgcacctaaaacatcgctaatctcattgtttgttccctggagtatgagagtcgggggggtgttaatcttggaaattatttttctaaccttgttggtagccttcaagacctgactagcaaatccagccttaattttttcatgattgattaatgggtcgtattggtatttataaactttatccatatctctagatactgattctggacatagctttccgactggcgcatttggtgtgatggttcccataagtttggcagctagcagattcagttttgaaacagcatctgcattaactagaggagacattagaatcattgctgtaaacaagtttggattatcgtaagaggctagtatagaaattgttgctcccatggaatgacccaataagtagatttaatagttaccacgtgctgtaccaaagtcatcaatcatcattttttcaccattacttcttccatgtccaatatgatcatgtgagaatactaaaattcctaacgatgatatgttttcagctagttcgtcataacgtccagaatgtttaccagctccatgacttatgaatactaatgccttaggatatgtaataggtttccaatatttacaatatatgtaatcattgtccagattgaacatacagtttgcactcatgattcacgttatataactatcaatattaacagttcgtttgatgatcatattatttttatgttttattgataattgtaaaaacatacaattaaatcaatatagaggaaggagacggatactgtcttttgtgagatagtcatggcgactaaatcagattatgaggatgctgttttttactttgtggatgatgataaaatatgtagtcgcgactccatcatcgatctaatagatgaatatatcacgtggagaaatcatgttatagtgtttaacaaagatattaccagttgtggaagactgtacaaggaattgatgaagttcgatgatgccgctatacagtactatggtattgataaaattaatgagattgtcgaagctatgagcgaaggagaccactacatcaattttacaaaagtccatgatcaggaaagtttattcgctaccataggaatatgtgctaaaatcactgaacattggggatacaaaaagatttcagaatctagattccaatcattgggaaacattacagatctgatgaccgacgataatataaacatcttgatactttttctagaaaaaaaattgaattgatgatataggggtcttcataacgcataattattacgttagcattctatatccgtgttaaaaaaaattatcctatcatgtatttgagagttttatatgtagcaaacatgatagctgtgatgccaataagctttagatattcacgcgtgctagtgttagggatggtattatctggtggtgaaatgtccgttatataatctacaaaacaatcatcgcatatagtatgcgatagtagagtaaacatttttatcgtttctactgggttcatacatcgtctacccaattcggttatgaatgaaattgtcgccaatcttacacccaaacccttgttatccattagcatagtattaacttcgttatttatgtcataaactgtaaatgattctgtagatgccatatcatacatgatattcatgtccctattataatcattactaactttatcacaatatatgttgataatatctatatatgatctagtctttgtgggcaactgtctatacaagtcgtctaaacgttgtttactcatatagtatcgaacagccatcattacatggtcccgttccgttgatagataatcgagtatgttagtggacttgtcaaatctatataccatattttctggaagtggatatacatagtcgtgatcaacattattgctagcctcatcttctatatcctgtactataccattatctatatcatctacataatctacgatattattatacataaacatcgacaacatactattgtcaattatctaagtcctgttgatccaaacccttgatctcctctatctgtactatctagagattgtacttcttccagttctggataatatatacgttgatagattagctgggctattctatcccccgtatttacattaaacgtacattttccattattaataagaataactcctatgtttcccctataatcttcgtctattacaccgcctcctatatcaatgccttttagggacagaccagacctaggagctattctaccatagcagaacttaggcatggacatactaatatctgtcttaattaactgtcgttctccaggagggatagtataatcgtaagcgctatataaatcatatccggcggcgtaaggtgattgcctagtaggagatttagctctgttagtttccttaacaaatctaactggtgagttaatattcatgttgaacataaaactaatattttatttcaaaattatttaccatcccatatattccatgaataagtgtgatgattgtacacttctatagtatctatatacgattcacgataaaatcctcctatcaatagcagtttattatccactatgatcaattctggattatccctcggataaataggatcatctatcagagtccatgtattgctggattcacaataaaattccgcatttctaccaaccaagaataaccttctaccgaacactaacgcgcatgatttataatgaggataataagtggatggtccaaactgccactgatcatgattgggtagcaaatattctgtagttgtatcagtttcagaatgtcctcccattacgtatataacattgtttatagatgccactgctggattacatctaggtttcagaagactcggcatattaacccaagcagcatccccgtggaaccaacgctcaacagatgtgggatttggtagacctcctactacgtataatttattgttagcgggtatcccgctagcatacagtctggggctattcatcggaggaattggaatccaattgtttgatatataatttacagctatagcattgttatgtatttcattgttcatccatccaccgatgagatatactacttctccaacatgagtacttgtacacatatggaatatatctataatttgatccatgttcataggatactctatgaatggatacttgtatgatttgcgtggttgtttatcacaatgaaatattttggtacagtctagtatccattttacattatttatacctctgggagaaagataatttgacctgattacatttttgataaggagtagcagatttcctaatttatttcttcgctttatataccacttaatgacaaaatcaactacataatcctcatctggaacatttagttcatcgctttctagaataagtttcatagatagataatcaaaattgtctatgatgtcatcttccagttccaaaaagtgtttggcaataaagtttttagtatgacataagagattggatagtccgtattctatacccatcatgtaacactcgacacaatattcctttctaaaatctcgtaagataaagtttatacaagtgtagatgataaattctacagaggttaatatagaagcacgtaataaattgacgacgttatgactatctatatatacctttccagtatatgagtaaataactatagaagttaaactgtgaatgtcaaggtctagacaaacccttgtaactggatctttatttttcgtgtatttttgacgtaaatgtgtgcgaaagtaaggagataactttttcaatatcgtagaattgactattatattgccacctatagcatcaataattgttttgaatttcttagtcatagacaatgctaatatattcttacagtacacagtattaacaaatatcggcatttatgtttctttaaaagtcaacatctagagaaaaatgattatctttttgagacataactcccattttttggtattcacccacacgtttttcgaaaaaattagtttttccttccaatgatatattttccatgaaatcaaacggattggtaacattataaatttttttaaatcccaattcagaaatcaatctatccgcgacgaattctatatatgttttcatcatttcacaattcattcctataagtttaactggaagagccgcagtaagaaattcttgttcaatggatactgcatctgttataatagatctaacggtttcttcactcggtggatacaataaatgtttaaacatcaaacatgcgaagtcgcagtgtagaccctcgtctctactaattagttcgttggaaaacgtgagtccgggcattaggccacgctttttaagccaaaatatggaagcgaatgatccggaaaagaagattccttctactgcagcaaaggcaataagtctctctccataaccggcgctgtcatgtatccacttttgagcccaatcggccttcttttttacacaaggcattgtttctatggcattaaagagatagtttttttcattactatctttaacataagtatcgatcaaaagactatacatttccgaatgaatgttttcaatggccatctgaaatccgtagaaacatctagcctcggtaatctgtacttctgtacaaaatcgttccgccaaattttcattcactattccgtcactggctgcaaaaaacgccaatacatgttttataaaatatttttcgtctggtgttagtttattccaatcattgatatctttagatatatctacttcttccactgtccaaaatgatgcctctgcctttttatacatgttccagatgtcatgatattggattgggaaaataacaaatctatttggatttggtgcaaggatgggttccataactaaattaacaatatcaataaattttttttcagttatctatatgcctgtacttggattttttgtacatcgatatcgccgcaatcactacaataattacaagtattattgatagcattgttattagtactatcataattaaattatcgacattcatgggtgctgaataatcgttattatcatcattatcattttgtaattgtgacatcatactaaataaatcgtttgcgagattgttgtgggaagcgggcatggaggatgcattatcattattatttaacgccttccatttggattcacaaatatggcgcgcgttcaacattttatggaaactataattttgtgaaaacagataacaagaaaactcgtcatcgttcaaatttttaacgatagtaaaccgattaaacgtcgagctaatttctaacgctagcgactctgttggatatgggtttccagatatatatcttttcagttcccctacgtatctataatcatctgtaggaaatggaagatatttccatttatctactgttcctaatatcatatgtggtggtgtagtagaaccattaagcgcgaaagatgttatttcgcatcgtattttaacttcgcaataatttctggttagataacgcactctaccagtcaagtcaatgatattagcctttacagatatattcatagtagtcgtaacgatgactccatcttttagatgcgatactcctttgtatgtaccagaatcttcgtacctcaaactcgatatatttaaacaagttaatgagatattaacgcgttttatgaatgatgatatataaccagaagttttatcctcggtggctagcgctataaccttatcattataataccaactagtgtgattaatatgtgacacgtcagtgtgggtacaaatatgtacattatcgtctacgtcgtattcgatacatccgcatacagccaacaaatataaaatgacaaatactctaacgccgttcgtacccatcttgatgcggtttaataaatgttttgatttcaatttattgtaaaaaaagattcggttttatactgttcgatattctcattgcttatattctcatctatcatctccacacagtcaaatccgtggttagcatgcacctcatcaaccggtaaaagactatcggactcttctatcattataactctagaatatttaatttggtcattattaatcaagtcaattatcttatttttaacaaacgtgagtattttactcattttttataaaaacttttagaaatatacagactctatcgtgtgtctatatcttctttttatatccaatgtatttatgtctgatttttcttcatttatcatatataatggtccaaattctacacgtgcttcggattcatccagatcattaaggttcttataattgtaacatccttctcttccctcttctacatcttccttcttattcttattcttagcgtcacagaatctaccacagcaggatcccatgacgagcgtcatattaaactaatccattttcaattataatatatgattagtaatgaccattaaaataaaaaatattcttcataaccggcaagaaagtgaaaagttcacattgaaactatgtcagtagtatacatcatgaaatgatgatatatatatactctattttggtggaggattatatgatataattcgtggataatcattcttaagacacatttcttcattcgtaaatcttttcacgttaaatgagtgtccatattttgcaatttcttcatatgatggcggtgtacgtggacgaggctgctcctgttcttgttgtggtcgccgactgtcgtgtttgcgtttatccctccattatcgcgattgcgtagatggagtactattatataccttgtaattaaatttttttattaattaaacgtataaaaacgttccgtatctgtatttaagagccagatttcgtctaatagaacaaatagctacagtaaaaataactagaataattgctacacccactagaaaccacggatcgtaatacggcaatcggttttcgataataggtggaacgtatattttatttaaggacttaacaattgtctgtaaaccacaatttgcttccgcggatcctgtattaactatctgtaaaagcatatgttggccgggcggagccgaacattctccgatatccaatttctgtatatctataatattattaacctccgcatacgcattacagttcttttctagcttggataccgcactaggtacatcgtctagatctattcctatttcctcagcgatagctcttctatccttttccggaagcaatgaaatcacttcaataaatgattcaaccatgagtgtgaaactaagtcgagaattactcatgcatttgttagttattcggagcgcgcaatttttaaactgtcctataacctctcctatatgaatagcacaagtgacattagtagggatagaatgttgagctaatttttgtaaataactatctataaaaagattatacaaagttttaaactctttagtttccgccatttatccagtctgagaaaatgtctctcataataaatttttccaagaaactaattgggtgaagaatggaaacctttaatctatatttatcacagtctgttttggtacacatgatgaattcttctaatgccgtactaaattcgatatctttttcgatttctggatatgtttttaataaagtatgaacaaagaaatggaaatcgtaataccagttatgtttaactttgaaattgttttttattttcttgttaatgattccagccacttgggaaaagtcaaagtcgtttaatgccgatttaatacgttcattaaaaacaaactttttatcctttagatgaattattattggttcattggaatcaaaaagtaagatattatcgggtttaagatctgcgtgtaaaaagttgtcgcagcatggtagttcgtagattttaatgtataacagagccatctgtaaaaagataaactttatgtattgtaccaaagatttaaatcctaatttgatagctaactcggtatctactttatctgccgaatacagtgctaggggaaaaattataatgtttcctctttcgtattcgtagttagttctcttttcatgttcgaaaaagtgaaacatgcggttaaaatagtttataacattaatattactgttaataactgccgggtaaaagtgggatagtaatttcacgaatttgatactgtcctttctctcgttaaacgcctttagaaaaactttagaagaatatctcaatgatagttcctgaccatccatagtttgtatcaataatagcaacatatgaagaacacgtttatacagagtatgtaaaaatgttaatttatagtttaatcccatggcccacgcacacacgattaattttttttcatctccctttagattgttgtatagaaatttgggtactgtgaactccgccgtagtttccatgggactatataattttgtggcctcgaatacaaattttactacatagttatctatcttaaaaactataccatatcctcctgtagatatgtgataaaaatcgtcgtttataggataaaatcgtttatccttttgttggaaaaaggatgaattaatgtaatcattctcttctatctttagtagtgtttccttattaaaattcttaaaataatttaacaatctaactgacggagcccaattttggtgtaaatctaattgggacattatattgttaaaatacaaacagtctcctaatataacagtatctgataatctatggggagacatccattgatattcaggggatgaatcattggcaacacccatttattgtacaaaaagccccaatttacaaacgaaagtccaggtttgatagagacaaactattaactattttgtctctgtttttaacacctccacagtttttaatttctttagtaatgaaattattcacaatatcagtatcttctttatctaccagagattttactaacttgataaccttggctgtctcattcaatagggtagtaatatttgtatgtgtgatattgatatctttttgaattgtttcttttagaagtgattctttgatggtgccagcatacgaattacaataatgcagaaactcggttaacatgcaggaattatagtaagccaattccaattgttgcctgtgttgtattagagtgtcaatatgagcaatggtgtccttgcgtttctctgatagaatgcgagcagcgattttggcgttatcatttgacgatatttctggaatgacgaatcctgtttctactaactttttggtaggacaaagtgaaacaatcaagaagatagcttctcctcctatttgtggaagaaattgaactcctctagatgatctactgacgatagtatctccttgacagatattggaccgaattacagaagtacctggaatgtaaagccctgaaaccccctcattttttaagcagattgttgccgtaaatcctgcactgtgaccaagatagagagctcctttggtgaatccatctctatgtttcagtttaaccaagaaacagtcagctggtctaaaatttccatctctatctaatacagcatctaacttgatgtcaggaactatgaccggtttaatgttatatgtaacattgagtaaatccttaagttcataatcatcactgtcatcagttatgtacgatccaaacaatgtttctactggcatagtggatacgaagatgctatccatcagaatgtttccctgattagtattttctatatagctattcttctttaaacgattttccaaatcagtaactatgttcatttttttaggagtaggacgcctagccagtatggaagaggattttctagatcctctcttcaacatctttgatctcaatggaatgcaaaaccccatagtgaaacaaccaacgataaaaataatattgtttttcactttttataattttaccatctgactcatggattcattaatatctttataagagctactaacgtataattctttataactgaactgagatatatacaccggatctatggtttccataattgagtaaatgaatgctcggcaataactaatggcaaatgtataaaacaacgaaattatactagagttgttaaagttaatattttctatgagctgttccaataaattatttgttgtgactgcgttcaagtcataaatcatcttgatactatccagtaaacagtctttaagttctggaatattatcatcccattgtaaagcccctaattcgactatcgaatatcctgctctgatagcagtttcaatatcgacggacgtcaatactgtaataaaggtggtagtattgtcatcatcgtgataaactacgggaatatggtcgttagtaggtacggtgactttacacaacgcgatatataactttccttttgtaccatttttaacgtagttgggacgtcctgcagggtattgttttgaagaaatgatatcgagaacagatttgatacgatatttgttggattcctgattattcactataatataatctagacagatagatgattcgataaatagagaaggtatatcgttggtaggataatacatccccattccagtattctcggatactctattgatgacactagttaagaacatgtcttctattctagaaaacgaaaacatcctacatggactcattaaaacttctaacgctcctgattgtgtctcgaatgcctcgtacaaggatttcaaggatgccatagattctttgaccaacgatttagaattgcgtttagcatctgatttttttattaaatcgaatggtcggctctctggtttgctaccccaatgataacaatagtcttgtaaagataaaccgcaagaaaatttatacgcatccatccaaataaccctagcaccatcggatgatattaatgtattattatagattttccatccacaattattgggccagtatactgttagcaacggtatatcgaatagattactcatgtaacctactagaatgatagttcgtgtactagtcataatatctttaatccaatctaagaaatttaaaattagattttttacactgttaaagttaacaaaggtattacccggatacgtggatatcatatatggcattggtccattatcagtaatagctccataaactgatacggcgatggtttttatatgtgtttgatctaacgaggaagaaattcgcgcccacaattcatctctagatatgtatttaatatcaaacggtaacacatcaatttcgggacgcgtatatgtttctaaatttttaatccaaatataatgatgacctatatgccctattatcatactgtcaactatagtacacctagagaacttacgatacatctgtttcctataatcgttaaattttacaaatctataacatgctaaaccttttgacgacaaccattcattaatttctgatatggaatctgtattctcgataccgtattgttctaaagccagtgctatatctccctgttcgtgggaacgctttcgtataatatcgatcaacggataatctgaagtttttggagaataatatgactcatgatctatttcgtccataaacaatctagacataggaattggaggcgatgatcttaattttgtgcaatgagtcgtcaatcctataacttctaatattgtaatattcatcatcgacataacactatctatgttatcatcgtatattagtataccacggccttcttcatttcgtgccaaaataatatacagtcttaaataattacgcaatatctcaatagtttcataattgttagctgttttcatcaaggtttgtatcctgtttaacatgatggcgttctataacgtctctattttctatttttaattttttaaatttttaacgatttactgtggctagatacccaatctctctcaaatatttttttagcctcgcttacaagctgtttatctatactattaaaactgacgaatccgtgattttggtaatgggttccgtcgaaatttgccgaagtgatatgaacatattcgtcgtcgactatcaacaattttgtattattctgaatagtgaaaaccttcacagatagatcattttgaacacacaacgcgtctagacttctggcggttgccatagaatatacgtcgttcttatcccaattaccaactagaagtctgatcttaactcctctattaatggctgcttctataatggagttgtaaatgtcaggccaatagtagctattaccgtcgacacgtgtagtgggaactatggccaaatgttcaatatctatactagtcttagccgacttgagtttatcaataactacatcagtgtctagatctctagaatatcccaataggtgttctggagaatcagtaaagaacactccacctataggattcttaatatgatacgcagtgctaactggcagacaacaagccgcagagcataaattcaaccatgaattttttgcgctattaaaggctttaaaagtatcaaatcttctacgaagatctgtggccagcgggggataatcagaatatacacctaacgttttaatcgtatgtatagatcctccagtaaatgacgcgtttcctacataacatctttcatcatctgacacccaaaaacaaccgagtagtagtcccacattattttttttatctatattaacggttataaaatttatatccgggcagtgactttgtagctctcccagatttcttttccctcgttcatctagcaaaactattattttaatccctttttcagatgcctcttttagtttatcaaaaataagcgcgcccctagtcgtactcagaggattacaacaaaaagatgctatgtatatatatttcttagctagagtgataatttcgttaaaacattcaaatgttgttaaatgatcggatctaaaatccatattttctggtagtgtttctaccagcctacattttgctcccgcaggtaccggtgcaaatggccacatttagttaacataaaaacttatacatcctgttctatcaacgattctagaatatcatcggctatatcgctaaaattttcatcaaagtcgacatcacaacctaactcagtcaatatattaagaagttccatgatgtcatcttcgtttatttctatatccgtatccattgtagattgttgaccgattatcgagtttaaatcattactaatactcaatccttcagaatacaatctgtgtttcattgtaaatttataggcggtgtatttaagttggtagattttcaattatgtatcaatatagcaacagtagttcttgctcctccttgattctagcatcctcttcattattttcttctacgtacataagcatgtccaatacgttagacaacacaccgacgatggcggccgccacagacacgaatatgactagaccgatgaccatttaaaaacccctctctagctttcacttaaactgtatcgattattcttttagaacatgtataatataaaaacattattctatttcgaatttaggcttccaaaaatttttcatccgtaaaccgataataatatatatagacttgttaatagtcggaataaatagattaatgcttaaactatcatcatctccacgattagagatacaatatttacattctttttgctgtttcgaaactttatcaatacacgttaatacaaacccaggaaggagatattgaaactgaggctgttgaaaatgaaacggtgaatacaataattcagataatgtaaaatcatgattccgtattctgatgatattagaactgctaatggatgtcgatggtatgtatctaggagtatctattttaacaaagcatcgatttgctaatatacaattatcattttgattaattgttattttattcatattcttaaaaggtttcatatttatcaattcttctacattaaaaatttccatttttaatttatgtagccccgcaatactcctcattacgtttcattttttgtctataatatccattttgttcatctcggtacatagattatccaattgagaagcgcatttagtagttttgtacattttaagtttattgacgaatcgtcgaaaactagttatagttaacattttattatttgataccctgatattaatacccctgccgttactattatttataactgatgtaacccacgtaacattagaattaattatcgatagtaatgcatcgacgcttccaaaattgtctattataaactcaccgataatttttttattgcatgttttcatattcattaggattatcaaatctttaatcttattacgattgtatgcgttgatattacaagacgtcattctaaaagacggaggatctccatcaaatgccagacaatcacgtacaaagtacatggaaataggttttgttctattgcgcatcatagattcatatagaacacccatagaaatactaatttgttttactctataaaatactaatgcatctatttcatcgttttgtataacgtctttccaagtgccaaattccaaatttttttcattgatagtaccaaattcttctatctctttaactacttgcatagataggtaattacagtgatgcctacatgccgttttttgaaactgaatagatgcgtctagaagcgatgctacactagtcacaatcaccactttcatatttagaatatatgtatgtaaaaatatagtagaatttcattttgtttttttctatgctataaatgaattctcattttgcatctgctcatactccgttttatatcaataccaaagaaggaagatatctggttctaaaagccgttaaagtatgcgatgttagaactgtagaatgcgaaggaagtaaagcttcctgcgtactcaaagtagataaaccctcatcgcccgcgtgtgagagaagaccttcgtccccgtccagatgcgagagaatgaataaccctggaaaacaagtcccgtttatgaggacggacatgctacaaaatatgttcgcggctaatcgcgataatgtagcttctagacttttgtcctaaaatactattatatccttttcgatattaataaatccgtgtcgtccaggttttttatctctttcagtatgtgaatagataggtattttatctctattcatcatcgaatttaagagatccgataaacattgtttgtattctccagatgtcagcatctgatacaacaatatatgtgcacataaacctctggcacttatttcatgtaccttccccttatcactaaggagaatagtatttgagaaatatgtatacatgatattatcatgaattagatatacagaatttgtaacactctcgaaatcacacgatgtgtcggcgttaagatctaatatatcactcgataacacattttcatctagatacactagacattttttaaagctaaaatagtctttagtagtgacagtaactatgcgattattttcatcgatgatacatttcatcggcatattattacgcttaccatcaaagactataccatgtgtatatctaacgtattctagcatggttgccatacgtgcattaaacttttcaggatctttggatagatcttccaatctatctatttgagaaaacatttttatcatgttcaatagttgaaacgtcggatccactatatagatattatctataaagattttaggaactacgttcatggtatcctggcgaatattaaaactatcaatgatatgattatcgttttcatcttttatcaccatatagtttctaagatatgggattttacttaatataatattatttcccgtgataaattttattagaaaggccaaatctataagaaaagtcctagaattagtctgaagaatatctatatcgccgtaccgtatatttggattaattagatatagagaatatgatccgtaacatatacaacttttattatggcgtctaagatattcttccatcaacttattaacatttttgactagggaagatacattatgacgtcccattacttttgccttgtctattactgcgacgttcatagaatttagcatatctcttgccaattcttccattgatgttacattataagaaattttagatgaaattacatttggagctttaatagtaagaactcctaatatgtccgtgtatgtggtcactaatacagattgtagttctataatcgtaaataatttacctatattatatgtttgagtctgtttagaaaagtagctaagtatacgatcttttatttctgatgcagatgtatcaacatcggaaaaaaatctttttttattcttttttactaaagatacaaatatgtctttgttaaaaacagttattttctgaatatttctagcttgtaattttaacatatgatattcgttcacactaggtactctgcctaaataggtttctataatctttaatgtaatattaggaagagtattctgatcaggattcctattcattttgaggatttaaaactctgattattgtctaatatggtctcaacacaaactttttcacagagcgatagagtttttgataactcgtttttcttaagaaatataaaactactgtttccagagctcgctctatcttttattttatctaattcgatacaaactcctgatactggttcagaaagtaattcattaattttcagtcctttatagaagatatttaatatagataatacaaaattttcagttcttgatatcgatctgattgatcctagaactagatatattaataacgtgctcattaggcagtttatggcagcttgataattagatatagtatattccagttcatatttattagataccgcattgcccagattttgatattctatgaattcctctgaaaataaatccaaaataactagacattctattttttgtggattagtgtactctcttccctctatcatgttcactactggtgtccacgatgataaatatctagagggaatataatatagtccataggatgccaatctagcaatgtcgaataactgtaatttgattcttcgttcttcattatgaattgattcttgaggtataaacctaacacaaattatattattagacttttcgtatgtaatgtctttcatgttataagtttttaatcctggaatagaatctattttaatgaggcttttaaacgcagagttctccaacgagtcaaagcataatactctgttgtttttcttatatacgatgttacgattttcttctttgaatggaataggtttttgaattagtttataattacaacataatagataaggaagtgtgcaaatagtacgcggaaaaaacataatagctcccctgttttcatccatggttttaagtaaatgatcactggcttctttagtcaatggatattcgaacattaaccgtttcatcatcattggacagaatccatatttcttaatgtaaagagtgatcaaatcattgtgtttattgtaccatcttgttgtaaatgtgtattcggttatcggatctgctcctttttctattaaagtatcgatgtcgatctcgtctaagaattcaactatatcgacatatttcatttgtatacacataaccattactaacgtagaatgtataggaagagatgtaacgggaacagggtttgttgattcgcaaactattctaatacataattcttctgttaatacgtcttgcacgtaatctattatagatgccaagatatctatataattattttgtaagatgatgttaactatgtgatctatataagtagtgtaataattcatgtatttcgatatatgttccaactctgtctttgtgatgtctagtttcgtaatatctatagcatcctcaaaaaatatattcgcatatattcccaagtcttcagttctatcttctaaaaaatcttcaacgtatggaatataataatctattttacctcttctgatatcattaatgatatagtttttgacactatcttctgtcaattgattcttattcactatatctaagaaacggatagcgtccctaggacgaactactgccattaatatctctattatagcttctggacataattcatctattataccagaattaatgggaactattccgtatctatctaacatagttttaagaaagtcagaatctaagacctgatgttcatatattggttcatacatgaaatgatctctattgatgatagtgactatttcattctctgaaaattggtaactcattctatatatgctttccttgttgatgaaggatagaatatactcaatagaatttgtaccaacaaactgttctcttatgaatcgtatatcatcatctgaaataatcatgtaaggcatacatttaacaattagagacttgtctcctgttatcaatatactattcttgtgataatttatgtgtgaggcaaatttgtccacgttctttaattttgttatagtagatatcaaatccaatggagctacagttcttggcttaaacagatatagtttttctggaacgaattctacaacattattataaaggactttgggtagataagtgggatgaaatcctattttaattaatgcgatagccttgtcctcgtgcagatatccaaacgcttttgtgatagtatggcattcattgtctagaaacgctctacgaatatctgtgacagatatcatctttagagaatatactagtcgcgttaatagtactacaatttgtattttttaatctatctcaataaaaaaattaatatgtatgattcaatgtataactaaactactaactgttattgataactagaatcagaatctaatgatgacgtaaccaagaagtttatctactgccaatttagctgcattatttttagcatctcgtttagattttccatctgccttatcgaatactcttccgtcgatgtctacacaggcataaaatgtaggagagttactaggccccactgattcaatacgaaaagaccaatctctcctagtaatttggcagtactcattaataacggtgacagggttagcacctttccaatcaataatttttttagccggaataacatcatcaaaagacttatgatcctctctcattgatttttcgcgggatacatcatctattatggcgtcagccataacatcagcatccggcttatccgcctccgttgtcataaaccaacgaggaggaatatcgtcggagctgtacaccatagcactacgttgaagatcgtacagagctttattaacttctcgcttctccatattaagttgtctagttagttgtgcagcagtagctccttcgattccaatggttttaatagcctcacacacaatctctgcgttagaacgttcgtcgatatagattttagacatttttagagagaactaacacaaccagcaataaaactgaacctactttatcatttttttattcatcatcctctggtggttcgtcgttcctatcgaatgtggatctgattaacccgtcatctataggtgatgctggttctggagattctggaggagatggattattatctggaagaatctctgttatttccttgttttcatgtatcgattgcgttgtaacattaagattgcgaaatgctctaaatttgggaggcttaaagtgttgtttgcaatctctacacgcatgtctaactagtggaggttcgtcagcggctctagtttgaatcatcatcggcgtagtattcctacttttacagttaggacacggtgtattgtatttctcgtcgagaacgttaaaataatcgttgtaactcacatcctttattttatctatattgtattctactcctttcttaatgcattttataccgaataagagatagcgaaggaattctttttcggtgccgctagtacccttaatcatatcacatagtgttttatattccaaatttgtggcaatagacggtttatttctatacgatagtttgtttctggaatcctttgagtattctataccaatattattctttgattcgaatttagtttcttcgatattagattttgtattacctatattcttgatgtagtactttgatgatttttccatggcccattctattaagtcttccaagttggcatcatccacatattgtgatagtaattctcggatatcagtagcggctaccgccattgatgtttgttcattggatgagtaactactaatgtatacattttccatttataacacttatgtattaactttgttcatttatattttttcattattatgttgatattaacaaaagtgaatatatatgttaataattgtattgtggttatacggctacaatttcataatgagtggaagtcagtgtccgatgatcaatgacgatagctttactctgaaaagaaagtatcaaatcgatagtgcggagtcaacaataaaaatggataagaagaggataaagtttcagaatagagccaaaatggtaaaagaaataaatcagacaataagagcagcacaaactcattacgagacattgaaactaggatacataaaatttaagagaatgattaggactactactctagaagatatagcaccatctattccaaataatcagaaaacttataaactattctcggacatttcagccatcggcaaagcatcacagaatccgagtaagatggtatatgctctgctgctttacatgtttcccaatttgtttggagatgaccatagattcattcgttatagaatgcatccaatgagtaaaatcaaacacaagatcttctctcctttcaaacttaatcttattagaatattagtggaagaaagattctataataatgaatgcagatctaataaatggagaataattggaacacaagttgataaaatgttgatagctgaatctgataaatatacaatagatgcaaggtataacctaaaacccatgtatagaatcaagggaaaatctgaagaagataccctcttcatcaaacagatggtagaacaatgtgtgacatcccaggaattggtggaaaaagtgttgaagatactgtttagagatttgttcaagagtggagaatacaaagcatacagatacgatgatgatgtagaaaatggatttattggattggatacactaaaattaaacattgttcatgatatagttgaaccatgtatgcctgttcgtaggccagtggctaagatactgtgtaaagaaatggtaaataaatactttgagaatccgctacatattattggtaaaaatcttcaagagtgcattgactttgttagtgaataggcatttcatctttctccaatactaattcaaattgttaaattaataatggatagtataaatagttattagtgataaaatagtaaaaataattattagaataagagtgtagtatcatagataactctcttctataaaaatggattttattcgtagaaagtatcttatatacacagtagaaaataatatagattttttaaaggatgatacattaagtaaagtaaacaattttaccctcaatcatgtactagctctcaagtatctagttagcaattttcctcaacacgttattactaaggatgtattagctaataccaatttttttgttttcatacatatggtacgatgttgtaaagtgtacgaagcggttttacgacacgcatttgatgcacccacgttgtacgttaaagcattgactaagaattatttatcgtttagtaacgcaatacaatcgtacaaggaaaccgtgcataaactaacacaagatgaaaaatttttagaggttgccgaatacatggacgaattaggagaacttataggcgtaaattatgacttagttcttaatccattatttcacggaggggaacccatcaaagatatggaaatcatttttttaaaactgtttaagaaaacagacttcaaagttgttaaaaaattaagtgttataagattacttatttgggcatacctaagcaagaaagatacaggcatagagtttgcggataatgatagacaagatatatatactctatttcaacaaactggtagaatcgtccatagcaatctaacagaaacgtttagagattatatctttcccggagataagactagctattgggtgtggttaaacgaaagtatagctaatgatgcggatatcgttcttaatagacacgccattaccatgtatgataaaattcttagttatatatactctgagataaaacaaggacgcgttaataaaaacatgcttaagttagtttatatctttgagcctgaaaaagatatcagagaacttctgctagaaatcatatatgatattcctggagatatcctatctattattgatgcaaaaaacgacgattggaaaaaatattttattagtttttataaagctaattttattaacggtaatacatttattagtgatagaacgtttaacgaggacttattcagagttgttgttcaaatagatcccgaatatttcgataatgaacgaattatgtctttattctctacgagtgctgcggacattaaacgatttgatgagttagatattaataacagttatatatctaatataatttatgaggtgaacgatatcacattagatacaatggatgatatgaagaagtgtcaaatctttaacgaggatacgtcgtattatgttaaggaatacaatacatacctgtttttgcacgagtcggatcccatggtcatagagaacggaatactaaagaaactgtcatctataaaatccaagagtagacggctgaacttgtttagcaaaaacattttaaaatattatttagacggacaattggctcgtctaggtcttgtgttagatgattataaaggagacttgttagttaaaatgataaaccatcttaagtctgtggaggatgtatccgcattcgttcgattttctacagataaaaaccctagtattcttccatcgctaatcaaaactattttagctagttataatatttccatcatcgtcttatttcaaaggtttttgagagataatctatatcatgtagaagaattcttggataaaagcatccatctaaccaagacggataagaaatatatacttcaattgataagacacggtagatcatagaacagaccaaatatattattaataatttgtatatacatagatataattatcacatattaaaaattcacacatttttgataaatgggaactgctgcaacaattcagactcccaccaaattaatgaataaagaaaatgcagaaatgattttggaaaaaattgttgatcatatagttatgtatattagtgacgaatcaagtgattcagaaaataatcctgaatatattgattttcgtaacagatacgaagactatagatctctcattataaaaagtgatcacgagtttgtaaagctatgtaaaaatcatgcagagaaaagttctccagaaacgcaacaaatgattatcaaacacatatacgaacaatatcttattccagtatctgaagtactattaaaacctataatgtccatgggtgacataattacatataacggatgtaaagacaatgaatggatgctagaacaactctctaccctaaactttaacaatctccgcacatggaactcatgtagcataggcaatgtaacgcgtctgttttatacattttttagttatctgatgaaagataaactaaatatataagtataatcccattctaatactttaacctgatgtattacctgcatcttattagaatattaacctaactaaaagacataacataaaaactcattacatagttgataaaaagcggtaggatataaatattatggctgccaccgttccgcgttttgacgacgtgtacaaaaatgcacaaagaagaattctagatcaagaaacattttttagtagaggtctaagtagaccgttaatgaaaaacacatatctatttgataattacgcgtatggatggataccagaaactgcaatttggagtagtagatacgcaaacttagatgcaagtgactattatcccatttcgttgggattacttaaaaagttcgagtttctcatgtctctatataaaggtcctattccagtatacgaagaaaaagtaaatactgaattcatagccaatggatcgttctctggtagatacgtatcatatcttcgaaagttttctgctcttccaacaaacgagtttattagttttttgttactgacttccattccaatctataatatcttgttctggtttaaaaatactcagtttgatattactaaacacacattattcagatacgtctatacagataatgccaaacacctggcgttggctaggtatatgcatcaaacaggagactataagcctttgtttagtcgtctcaaagagaattatatatttaccggtcccgttccaataggtatcaaagatatagatcaccctaatcttagtagagcaagaagtccatccgattatgagacattagctaatattagtactatattgtactttaccaagtatgatccggtattaatgtttttattgttttacgtacctgggtattcaattactacaaaaattactccagccgtagaatatctaatggataaactgaatctaacaaagagcgacgtacaactgttgtaaattattttatgcttcgtaaaatgtaggttttgaaccaaacattctttcaaagaatgagatgcataaaactttattatccaatagattgactatttcggacgtcaatcgtttaaagtaaacttcgtaaaatattctttgatcactgccgagtttaaaacttctatcgataattgtctcatatgttttaatatttacaagttttttggtccatggtacattagccggacaaatatatgcaaaataatatcgttctccaagttctatagtttctggattatttttattatattcagtaaccaaatacatattagggttatctgcggatttataatttgagtgatgcattcgactcaacataaataattctagaggagacgatctactatcaaattcggatcgtaaatctgtttctaaagaacggagaatatctatacatacctgattagaattcatccgtccttcagacaacatctcagacagtctggttttgtacatcttaatcatattcttatgaaacttggaaacatctcttctagtttcactagtacctttattaattctctcaggtacagattttgaattcgacgatgccgagtatttcatcgttgtatatttcttcttcgattgcataatcagattcttatataccgcctcaaactctattttaaaattattaaacaatactctactattaatcagtcgttctaactctttcgctatttctatagacttatctacatcttgactgtctatctctgtaaacacggagtcggtatctccatacacgctacgaaaacgaaatctgtaatctataggcaacgatgttttcacaatcggattaatatctctatcgtccatataaaatggattacttaatggattggcaaaccgtaacataccgttagataactctgctccatttagtaccgattctagatacaagatcattctacgtcctatggatgtgcaactcttagccgaagcgtatgagtatagagcactatttctaaatcccatcagaccatatactgagttggctactatcttgtacgtatattgcatggaatcataaatggccttttcagttgaactggtagcctgttttaacatctttttatatctggctctctctgccaaaaatgttcttaatagtctaggaatggttccttctatcgatctatcgaaaattgctatttcagagatgaggttcggtagtctaggttcacaatgaaccgtaatatatctaggaggtggatatttctgaagcaatagctgattatttatttcttcttccaatctattggtactaacaacgacaccgactaatgtttccggagatagatttccaaagatacacacattaggatacagactgttataatcaaagattaatacattattactaaacattttttgttttggagcaaataccttaccgccttcataaggaaacttttgttttgtttctgatctaactaagatagttttagtttccaacaatagctttaacagtggacccttgatgactgtactcgctctatattcgaataccatggattgaggaagcacatatgttgacgcacccgcgtctgtttttgtttctactccataatactcccacaaatactgacacaaacaagcatcatgaatacagtatctagccatatctaaagctatgtttagattataatccttatacatctgagctaaatcaacgtcatcctttccgaaagataatttatatgtatcattaggtaaagtaggacataatagtacgactttaaatccattttcccaaatatctttacgaattactttacatataatatcctcatcaacagtcacataattacctgtggttaaaacctttgcaaatgcagcggctttgcctttcgcgtccgtagtatcgtcaccgatgaacgtcatttctctaactcctctatttaatactttacccatgcaactgaacgcgttcttggatatagaatccaatttgtacgaatccaatttttcagatttttgaatgaatgaatatagatcgaaaaatatagttccattattgttattaacgtgaaacgtagtattggccatgccgcctactcccttatgactagactgatttctctcataaatacagagatgtacagcttcctttttgtccggagatctaaagataatcttctctcctgttaataactctagacgattagtaatatatctcagatcaaagttatgtccgttaaaggtaacgacgtagtcgaacgttagttccaacaattgtttagctattcgtaacaaaactatttcagaacatagaactagttctcgttcgtaatccatttccattagtgactgtatcctcaaacatcctctatcgacggcttcttgtatttcctgttccgttaacatctcttcattaatgagcgtaaacaataatcgtttaccacttaaatcgatataacagtaacttgtatgcgagattgggttaataaatacagaaggaaacttcttatcgaagtgacactctatatctagaaataagtacgatcttgggatatcgaatctaggtatttttttagcgaaacagttacgtggatcgtcacaatgataacatccattgttaatctttgtcaaatattgctcgtccaacgagtaacatccgtctggagatatcccgttagaaatataaaaccaactaatattgagaaattcatccatggtggcattttgtatgctgcgtttctttggctcttctatcaaccacatatctgcgacggagcattttctatctttaatatctagattataacttattgtctcgtcaatgtctatagttctcatctttcccaacggcctcgcattaaatggaggaggagacaatgactgatatatttcgtccgtcactacgtaataaaagtaatgaggaaatcgtataaatacggtctcaccatttcgacatctggatttcagatataaaaatctgttttcaccgtgactttcaaaccaattaatgcaccgaacatccatttatagaatttagaaatatattttcatttaaatgaatcccaaacattggggaagagccgtatggaccattatttttatagtactttcgcaagcgggtttagacggcaacatagaagcgtgtaaacgaaaactatatactatagtcagcactcttccatgtcctgcatgtagacggcacgcgactatcgctatagaggacaataatgtcatgtctagcgatgatctgaattatatttattattttttcatcagattatttaacaatttggcatctgatcccaaatacgcgatcgatgtgacaaaggttaaccctttataaacttaacccattataaaacttatgattagtcacaactgaaataaccgcgtgattattttttggtataattctacacggcatggtttctgtaactatgaattcaacccccgttacattagtgaaatctttaacaaacagcaagggttcgtcaaagacataaaactcattgtttacaatcgaaatagaccccctatcacacttaaaataaaaaatatccttatcctttaccaccaaataaaattctgattggtcaatgtgaatgtattcacttaacagttccacaaatttatttattaactccgaggcacatacatcgtcggtattttttatggcaaactttactcttccagcatccgtttctaaaaaaatattaacgagttccatttatatcatccaatattattgaaatgacgttgatggacagatgatacaaataagaaggtacggtacctttgtccaccatctcctccaattcatgctctattttgtcattaactttaatgtatgaaaacagtacgccacatgcttccatgacagtgtgtaacactttggatacaaaatgtttgacattagtataattgttcaagactgtcaatctataatagatagtagctataatatattctatgatggtattgaagaagatgacaaccttggcatattgatcatttaacacagacatggtatcaacagatagcttgaatgaaagagaatcagtaattggaataagcgtcttctcgatagagtgtccgtataccaacatgtctgatattttgatgtattccattaaattatttagttttttctttttattttcgttaaacagcatttctgtcaacggaccccaacatcgttgaccgattaagttttgattgatttttccgtgtaatgcgtatctagtcagatcgtatagcctatccaataatccatcatctgtgcgtagatcacatcgtacactttttaattctctatagaagagcgacagacatctggagcaattacagacagcaatttctttattctctacagatgtaagatacttgaagacattcctatgatgatgcagaattttggataacacggtattgatggtatctgttaccataattcctttgatggctgatagtgtcagagcacaagatttccaatctttgacaatttttagcaccattatctttgttttgatatctatatcagacagcatggtgcgtctgacaacacagggattaagacggaaagatgaaatgattctctcaacatcttcaatggataccttgctattttttctggcattatctatatgtgcgagaatatcctctagagaatcagtatcctttttgatgatagtggatctcaatgacatgggacgtctaaaccttcttattttatcaccagattgcatggtgatttgtcttctttcttttatcataatgtaatctctaaattcatcggcaaattgtctatatctaaaatcataatatgagatgtttacctctacaaatatctgttcgtccaatgttagagtatctacatcagttttgtattccaaattaaacatggcaacggatttaattttatattcctctattaagtcctcgtcgataataacagaatgtagataatcatttaatccatcgtacatggttggaagatgcttgttgacaaaatctttaattgtcttgatgaaggtgggactatatctaacatcttgattaataaaatttataacattgtccataggatactttgtaactagttttatacacatctcttcatcggtaagtttagacagaatatcgtgaacaggtggtatattatattcatcagatatacgaagaacaatgtccaaatctatattgtttaatatattatatagatgtagcgtagctcctacaggaatatctttaactaagtcaatgatttcatcaaccgttagatctattttaaagttaatcatataggcattgatttttaaaaggtatgtagccttgactacattctcattaattaaccattccaagtcactgtgtgtaagaagattatattctatcataagcttgactacatttggtcccgataccattaaagaattcttatgatataaggaaacagcttttaggtactcatctactctacaagaattttggagagccttaacgatatcagtgacgtttattatttcaggaggaaaaaacctaacattgagaatgtcggagttaatagcttccagatacagtgattttggcaatagtccgtgtaatccataatccagtaacacgagctggtgcttgctagacaccttttcaatgtttaatttttttgaaataagctttgataaagccttcctcgcaaattccggatacatgaacatgtcggcgacatgattaagtattgttttttcattatttttatattttctcaacaagttctcaataccccaatagatgatagaatatcacccaatgcgtccatgttgtctatttccaacaggtcgctatatccaccaatagaagtttttccaaaaaagattctaggaacagttctaccaccagtaatttgttcaaaatagtcacgcaattcattttcgggtttaaattctttaatatcgacaatttcatacgctcctcttttgaaactaaacttatttagaatatccagtgcatttctacaaaaaggacatgtatacttgacaaaaattgtcactttgttattggccaacctttgttgtacaaattcctcggccattttaatatttaagtgatataaaactatctcgacttatttaactctttagtcgagatatatggacgcagatagctatatgatagccaactacagaaggcaaacgctataaaaaacataattacgacgagcatatttataaatatttttattcagcattacttgatatagtaatattaggcacagtcaaacattcaaccactctcgatacattaactctctcattttctttaacaaattctgcaatatcttcgtaaaaagattcttgaaactttttagaatatctatcgactctagatgaaatagcgttcgtcaacatactatgttttgtatacataaaggcgcccattttaacagtttctagtgacaaaatgctagcgatcctaggatcctttagaatcacatagattgacgattcgtctctcttagtaactctagtaaaataatcatacaatctagtacgcgaaataatattatccttgacttgaggagatctaaacaatctagttttgagaacatcgataagttcatcgggaatgacatacatactatctttaatagaactcttttcatccagttgaatggattcgtccttaaccaactgattaatgagatcttctattttatcattttccagatgatatgtatgtccattaaagttaaattgtgtagcgcttctttttagtctagcagccaatactttaacatcactaatatcgatatacaaaggagatgatttatctatggtattaagaattcgtttttcgacatctgtcaaaaccaattcctttttgcctgtatcatccagttttccatcctttgtaaagaaattattttctactagactattaataagactgataaggattcctccataattgcacaatccaaactttttaacaaaactagactttacaagatctacaggaatgcgtacttcaggtttcttagcttgtgattttttcttttgtggacattttcttgtgaccaactcatctaccatttcattgattttagcagtgaaataagctttcaatgcacgggcactgatactattgaaaacgagttgatcttcaaattccgccatttaagttcaccaaacaacttttaaatacaaatatatcaatagtagtagaataagaactataaaaaaaataataattaaccaataccaaccccaacaaccggtattattagttgatgtgactgttttctcatcacttagaacagatttaacaatttctataaagtctgtcaaatcatcttccggagaccccataaatacaccaaatatagcggcgtacaacttatccatttatacattgaatattggcttttctttatcgctatcttcatcatattcatcatcaatatcaacaagtcccagattacgagccagatcttcttctacattttcagtcattgatacacgttcactatctccagagagtccgataacgttagccaccacttctctatcaatgattagtttcttgagtgcgaatgtaatttttgtttccgttccggatctatagaaaactacaggtgtgataattgccttggccaattgtctttctcttttactgagtgattctagttcaccttctatagatctgagaatggatgattctccagtcgaaacatattctaccatggatccgtttaatttgttgatgaagatggattcatccttaaatgttttctctgtaatagtttccaccgaaagactatgcaaagaatttggaatgcgttccttgtgcttaatgtttccatagacggcttctagaagttgatacaacataggactagccgcggtaacttttatttttagaaagtatccatcgcttctatcttgtttagatttatttttataaagtttagtctctccttccaacataataaaagtggaagtcatttgactagataaactatcagtaagttttatagagatagacgaacaattagcgtattgagaagcatttagtgtaacgtattcgatacattttgcattagatttactaatcgattttgcatactctataacacccgcacaagtctgtagagaatcgctagatgcagtaggtcttggtgaagtttcaactctcttcttgattaccttactcatgattaaacctaaataattgtactttgtaatataatgatatatattttcactttatctcatttgagaataaaaatgtttttgtttaaccactgcatgatgtacagatttcggaatcgcaaaccaccagtggttttattttatccttgtccaatgtgaattgaatgggagcggatgcgggtttcgtacgtagatagtacattcccgtttttagaccgagactccatccgtaaaaatgcatactcgttagtttggaataactcggatctgctatatggatattcatagattgactttgatcgatgaaggctcccctgtctgcagccatttttatgatcgtcttttgtggaatttcccaaatagttttataaactcgcttaatatcttctggaaggtttgtattctgaatggatccaccatctgccataatcctattcttgatctcatcattccataattttctctcggttaaaactctaaggagatgcggattaactacttgaaattctccagacaatactctccgagtgtaaatattactggtatacggttccaccgactcattatttcccaaaatttgagcagttgatgcagtcggcataggtgccaccaataaactatttctaagaccgtatgttctgattttatcttttagaggttcccaattccaaagatccgacggtacaacattccaaagatcatattgtagaataccgttactggcgtacgatcctacatatgtatcgtatggtccttccttctcagctagttcacaactcgcctctaatgcaccgtaataaatggtttcgaagatcttcttatttagatcttgtgcttccaggctatcaaatggataatttaagagaataaacgcgtccgctaatccttgaacaccaataccgataggtctatgtctcttattagagatttcagcttctggaataggataataattaatatctataattttattgagatttctgacaattactttgaccacatccttcagtttgagaaaatcaaatcgcccatctattacaaacatgttcaaggcaacagatgccagattacaaacggctacctcattagcatccgcatattgtattatctcagtgcaaagattactacacttgatagttcctaaattttgttgattactctttttgttacacgcatccttataaagaatgaatggagtaccagtttcaatctgagattctataatcgctttccagacgactcgagcctttattatagatttgtatctcctttctctttcgtatagtgtatacaatcgttcgaactcgtctccccaaacattgtccaatccaggacattcatccggacacatcaacgaccactctccgtcatccttcactcgtttcataaagagatcaggaatccaaagagctataaatagatctctggttctatgttcctcgtttcctgtattctttttaagatcgaggaacgccataatatcagaatgccacggttccaagtatatggccataactccaggccgtttgtttcctccctgatctatgtatctagcggtgttattataaactctcaacattggaataataccgtttgatataccattggtaccggagatatagcttccactggcacgaatattactaattgatagacctattccccctgccattttagagattaatgcgcatcgttttaacgtgtcatagataccctctatgctatcatcgatcatgttaagtagaaaacagctagacatttggtgacgactagttcccgcattaaataaggtaggagaagcgtgcgtaaaccatttttcagaaagtagattgtacgtctcaatagctgagtctatatcccattgatgaattcctactgcgacacgcattaacatgtgctgaggtctttcaacgatcttgttgtttattttcaacaagtaggatttttccaaagttttaaaaccaaaatagttgtatgaaaagtctcgttcgtaaataataaccgagttgagtttatccttatatttgttaactatatccatggtgatacttgaaataatcggagaatgtttcccatttttaggattaacatagttgaataaatcctccatcacttcactaaatagtttttttgtttccttgtgtagatttgatacggctattctggcggctagaatggcataatccggatgttgtgtagtacaagtggctgctatttcggctgccagagtgtccaattctaccgttgttactccattatatattccttgaataaccttcatagctattttaataggatctatatgatccgtgtttaagccataacataattttctaatacgagacgtgattttatcaaacatgacattttccttgtatccatttcgtttaatgacaaacatttttgttggtgtaataaaaaaattatttaacttttcattaatagggatttgacgtatgtagcgtacaaaattatcgttcctggtatatagataaagagtcctatatatttgaaaatcgttacggctcgattaaactttaatgattgcatagtgaatatatcattaggatttaactccttgactatcagggcggcaccagaaattaccatcaaaagcattaatacagttatgccgatcgcagttagaacggttatagcatccaccatttatatctaaaaattagatcaaagaatatgtgacaaagtcctagttgtatactgagaattgacgaaacaatgtttcttacatatttttttcttattagtaactgacttaatagtaggaactggaaagctagacttgattattctataagtatagatacccttccaaataatattctctttgataaaagttccagaaaatgtagaattttttaaaaagttatcttttgctattaccaagattgtgtttagacgcttattattaatatgagtgatgaaatccacaccgcctctagatatcgcttttatttccacattagatggtaaatccaatagtgaaactatctttttaggaatgtatggactcgcgtttagaggagtgaacgtcttaggcgtcggaaaggatgattcatcaaacgaataaacaatttcacaaatggatgttaatgtattagtaggaaattttttgacgctagtggaattgaagattctaatggatgatgttctacctatttcatccgataacatgttaatttccgacaccaacggttttaatatttcgatgatatacggtagtctctctttcggacttatatagcttattccacaatacgagtcattatatactccaaaaaacaaaataactagtataaaatctgtatcgaatgggaaaaacgaaattatcgacataggtatagaatctggaacattgaacgtattaatacttaattctttttctgtggtaagtaccgataggttattgacattgtatggttttaaatattctataacttgagacttgatagatattagtgatgaattgaaaattatttttatcaccacgtgtgtttcaggatcatcgtcgacgcccgtcaaccaaccgaatggagtaaaataaatatcattaatatatgctctagatattagtatttttatcaatcctttgattatcatcttctcgtaggcgaatgattccatgatcaagagtgatttaagaacatcctccggagtattaatgggcttagtaaacagtccatcgttgcaataataaaagttatccaagttaaaggatattatgcattcgtttaaagatatcacctcatctgacggagacaattttttggtaggttttagagactttgaagctacttgtttaacaaagttattcatcgtcgtttactattctatttaattttgtagttaatttatcacatatcacattaattgactttttggtccatttttccatacgtttatattcttttaatcctgcgttatccgtttccgttatatccagggatagatcttgcaagttaaatagaatgctcttaaataatgtcatttttttatccgctaaaaatttaaagaatgtataaacttttttcaaagatttaaaacttttaggtggagttctagtacacaatatcataaacaaactaataaacatcccgcattcagattccaacagctgattaacttccacattaatacagcctattttcgctccaaatgtacattcgaaaaatctgaataaaacatcgatgtcacaatttgtattatccaatacagaatgtctgtgattcgtgttaaaaccatcggagaaggaatagaaataaaaattattatagtggtggaattcagttggaatattgcctccggagtcataaaaggatactaaacattgttttttatcataaattacacatttccaatgagacaaataacaaaatccaaacattacaaatctagaggtagaacttttaattttgtctttaagtatatacgataagatatgtttattcataaacgcgtcaaatttttcatgaatcgctaaggagtttaagaatctcatgtcaaattgtcctatataatccacttcggatccataagcaaactgagagactaagttcttaatacttcgattgctcatccaggctcctctctcaggctctattttcatcttgacgacctttggattttcaccagtatgtattcctttacgtgataaatcatcgattttcaaatccatttgtgagaagtctatcgccttagatactttttcccgtagtcgaggtttaaagaaatacgctaacggtatactagtaggtaactcaaagacatcatatatagaatggtaacgcgtctttaactcgtcggttaactctttcttttgatcgagttcgtcgctactattgggtctgctcaggtgccccgactctactagttccaacatcataccgataggaatacaagacactttgccagcggttgtagatttatcatatttctccactacatatccgttacaatttgttaaaaatttagatacatctatattgctacataatccagctagtgaatatatatgacataataaattggtaaatcctagttctggtattttactaattactaaatctgtatatctttccatttatcatggaaaagaatttaccagatatcttcttttttccaaactgcgttaatgtattctcttacaaatattcacaagatgaattcagtaatatgagtaaaacggaacgtgatagtttctcattggcggtgtttccagttataaaacatagatggcataacgcacacgttgtaaaacataaaggaatatacaaagttagtacagaagcacgtggaaaaaaagtatctcctccatcactaggaaaacccgcacacataaacctaaccgcgaagcaatatatatacagtgaacacacaataagctttgaatgttatagttttctaaaatgtataacaaatacagaaatcaattcgttcgatgagtatatattaagaggactattagaagctggtaatagtttacagatattttccaattccgtaggtaaacgaacagatactataggtgtactagggaataagtatccatttagcaaaattccattggcctcattaactcctaaagcacaacgagagatattttcagcgtggatttctcatagacctgtagttttaactggaggaactggagtgggtaagacgtcacaggtacccaagttattgctttggtttaattatttatttggtggattctctactctagataaaatcactgactttcacgaaagaccagtcattctatctcttcctaggatagctttagttagattgcatagcaataccattttaaaatcattgggatttaaggtactagatggatctcctatttctttacggtacggatctataccggaagaattaataaacaaacaaccaaaaaaatatggaattgtattttctacccataagttatctctaacaaaactatttagttatggcactcttattatagacgaagttcatgagcatgatcaaataggagatattattatagcagtagcgagaaagcatcatacgaaaatagattctatgtttttaatgactgccacgttagaggatgacagggaacggctaaaagtatttttacctaatcccgcatttatacatattcctggagatacactgtttaaaattagcgaggtatttattcataataagataaatccatcttccagaatggcatacatagaagaagaaaagagaaatttagttactgctatacagatgtatactcctcctgatggatcatccggtatagtctttgtggcatccgttgcacagtgtcacgaatataaatcatatttagaaaaaagattaccgtatgatatgtatattattcatggtaaggtcttagatatagacgaaatattagaaaaagtgtattcatcacctaatgtatcgataattatttctactccttatttggaatccagcgttactatacacaatgttacacacatttatgatatgggtagagtttttgtccccgctccttttggaggatcgcaacaatttatttctaaatctatgagagatcaacgaaaaggaagagtaggaagagttaatcctggtacatacgtctatttctatgatctgtcttatatgaagtctatacagcgaatagattcagaatttctacataattatatattgtacgctaataagtttaatctaacactccccgaagatttgtttataatccctacaaatttggatattctatggcgtacaaaggaatatatagactcgttcgatattagtacagaaacatggaataaattattatccaattattatatgaagatgatagagtatgctaaactttatgtactaagtcctattctcgctgaggagttggataactttgagaggacgggagaattaactagtattgtacgagaagccattttatctctaaatttacgaattaagattttaaattttaaacataaagatgatgatacgtatatacacttttgtaaaatattattcggtgtctataacggaacaaacgctactatatattatcatagacctctaacgggatatatgaatatgatttcagatactatatttgttcctgtagataataactaaaaatcaaactctaatgaccacatctttttttagagatgaaaaattttctacatctccttttgtagacacgactaaacattttgcagaaaaaagtttattagtgtttagataatcgtatacttcatcagtgtagatagtaaatgtgaacagataaaaggtattcttgctcaatagattggtaaattccatagaatatattaatcctttcttcttgagatcccacatcatttcaaccagagacgttttatccaatgatttacctcgtactataccacatacaaaactagattttgcagtgacgtcgtacctggtattcctaccaaacaaaattttacttttagttcttttagaaaattctaaggtagaatctctatttgccaatatgtcatctatggaattaccactagcaaaaaatgatagaaatatatattgatacatcgcagctggttttgatctactatactttaaaaacgaatcagattccataattgcctgtatatcatcagctgaaaaactatgttttacacgtattccttcggcatttctttttaatgatatatcttgtttagacaatgataaagttatcatgtccatgagagacgcgtctccgtatcgtataaatatttcattagatgttagacgcttcattaggggtatacttctataaggtttcttaatcagtccatcattggttgcgtcaagaactactatcggatgttgttgggtatctctagtgttacacatggccttactaaagtttgggtaaataactatgatatctctattaattatagatgcatatatttcattcgtcaaggatattagtatcgacttgctatcgtcattaatacgtgtaatgtaatcatataaatcatgcgatagccaaggaaaatttaaatagatgttcatcatataatcgtcgctataattcatattaatacgttgacattgactaatttgtaatatagcctcgccacgaagaaagctctcgtattcagtttcatcgataaaggataccgttaaatataactggttgccgatagtctcatagtctattaagtggtaagtttcgtacaaatacagaatccctaaaatattatctaatgttggattaatctttaccataactgtataaaatggagacggagtcataactattttaccgtttgtacttactggaatagatgaaggaataatctccggacatgctggtaaagacccaaatgtctgtttgaagaaatccaatgttccaggtcctaatctcttaacaaaaattacgatattcgatcccgatatcctttgcattctatttaccagcatatcacgaactatattaagattatctatcatgtctattctcccaccgttatataaatcgcctccgctaagaaacgttagtatatccatacaatggaatacttcatttctaaaatagtattcgttttctaattctttaatgtgaaatcgtatactagaaagggaaaaattatctttgagttttccgttagaaaagaaccacgaaactaatgttctgattgcgtccgattccgttgctgaattaatggatttacaccaaaaactcatataacttctagatgtagaagcattcgctaaaaaattagtagaatcaaaggatataagtagatgttccaacaagtgagcaattcccaagatttcatctatatcattctcgaatccgaaattagaaattcccaagtagatatcctttttcatccgatcgttgatgaaaatacgaactttattcggtaagacaatcatttactaaggagtaaaataggaagtaatgttcgtatgtcgttatcatcgtataaattaaaggtgtgttttttaccattaagtgacattataattttaccaatattggaattataatataggtgtatttgcgcactcgcgacggttgatgcatcggtaaatatagctgtatctaatgttctagtcggtatttcatcatttcgctgtctaataatagcgttttctctatctgtttccattacagctgcctgaagtttattggtcggataatatgtaaaataataagaaatacatacgaataacaaaaataaaataagatataataaagatgccatttagagatctaattttgttcaacttgtccaaattcctacttacagaagatgaggaatcgttggagatagtgtcttccttatgtagaggatttgaaatatcttatgatgacttgataacttactttccagataggaaataccataaatatatttataaagtatttgaacatgtagatttatcggaggaattaagtatggaattccatgatacaactttgcgagatttagtttatcttagattgtacaagtattccaagtgtatacggccgtgttataaattaggagataatctaaaaggcatagttgttataaaggacaggaatatttatattagggaagcaaatgatgacttgatagaatatctcctcaaggaatacactcctcagatttatacatattctaatgagcgcgtccccataactggttcaaaattaattctttgtggattttctcaagttacatttatggcgtatacaacgtcgcatataacaacaaataaaaaggtagatgttctcgtttccaaaaaatgtatagatgaactagtcgatccaataaattatcaaatacttcaaaatttatttgataaaggaagcggaacaataaacaaaatactcaggaagatattttattcggtaaccggtggccaaactccataggtagctttttctatttcggattttagaatttccaaattcaccagcgatttatcggttttggtgaaatccaaggatttattaatgtccacaaatgccatttgttttgtctgtggattgtatttgaaaatggaaacgatgtagttagatagatgcgctgcgaagtttcctattagggttccgcgcttcacgtcacccagcatacttgaatcaccatcctttaaaaaaaatgataagatatcaacatggagtatatcatactcggattttaattcttctactgcatcactgacattttcacaaatactacaatacggtttaccgaaaataatcagtacgttcttcatttatgggtatcaaaaacttaaaatcgttactgctggaaaataaatcactgacgatattagatgataatttatacaaagtatacaatggaatatttgtggatacaatgagtatttatatagccgtcgccaattgtgtcagaaacttagaagagttaactacggtattcataaaatacgtaaacggatgggtaaaaaagggagggcatgtaaccctttttatcgatagaggaagtataaaaattaaacaagacgttagagacaagagacgtaaatattctaaattaaccaaggacagaaaaatgctagaattagaaaagtgtacatccgaaatacaaaatgttaccggatttatggaagaagaaataaaggcaaaaatgcaattaaaaatcgataaacttacatttcaaatatatttatctgattctgataacataaaaatatcattgaatgagatactaacacatttcaacaataatgagaatgttacattattttattgtgatgaacgagacgcagaattcgttatgtgtctcgaggctaaaacacatttctctaccacaggagaatggccgttgataataagtaccgatcaggatactatgctatttgcatctactgataatcatcctaagatgataaaaaacttaactcaactgtttaaatttgttccctcggcagaggataactatttagcaaaattaacggcgttagtgaatggatgtgatttctttcctggactctatggggcatctataacacccaccaacttaaacaaaatacaattgtttagtgattttacaatcgataatatagtcactagtttggcaattaaaaattattatagaaagactaactctaccgtagacgtgcgtaatattgttacgtttataaacgattacgctaatttagacgatgtctactcgtatgttcctccttgtcaatgcactgttcaagaatttatattttccgcattagatgaaaaatggaatgaatttaaatcatcttatttagagaccgttccgttaccctgtcaattaatgtacgcgttagaaccacgtaaggagattgatgtttcagaagttaaaactttatcatcttatatagatttcgaaaatactaaatcagatatcgatgttataaaatctatatcctcgatttttggatattctaacgaaaactgtaacacgatagtattcggcatctataaggataatttactactgagtataaataattcattttactttaacgatagtctgttaataaccaatactaaaagtgataatataataaatataggttactagattaaaaatggtgttccaactcgtgtgctctacatgcggtaaagatatttctcacgaacgatataaattgattatacgaaaaaaatcattaaaggatgtactcgtcagtgtaaagaacgaatgttgtaggttaaaattatctacacaaatagaacctcaacgtaacttaacagtgcaacctctattggatataaactaatatggatccggttaattttatcaagacatatgcgcctagaggttctattatttttattaattataccatgtcattaacaagtcatttgaatccatcgatagaaaaacatgtgggtatttattatggtacgttattatcggaacacttggtagttgaatctacctatagaaaaggagttcgaatagtcccattggatagtttttttgaaggatatcttagtgcaaaagtatacatgttagagaatattcaagttatgaaaatagcagctgatacgtcattaactttattgggtattccgtatggatttggtcatgatagaatgtattgttttaaattggtagctgactgttataaaaatgccggtgttgaaacatcgtctaaacgaatattaggtaaagatatttttctgagccaaaacttcacagacgataatagatggataaagatatatgattctaataatttaacattttggcaaattgattaccttaaagggtgagttaatatgcataactactcctccgttgttttttccctcgttctttttcttaacgttgtttgccatcactctcataatgtaaagatattctaaaatggtaaacttttgcatatcggacgcagaaattggtataaatgttgtaattgtattatttcccgtcaatggactagtcacagctccatcagttttatatcctttagagtatttctcactcgtgtctaacattctagagcattccatgatctgtttatcgttgatattggccggaaagatagattttttattttttattatattactattggcaattgtagatataacttctggtaaatatttttctaccttttcaatctcttctattttcaagccggctatatattctgctatattgttgctagtatcaataccttttcttgctaagaagtcatatgtggtattcactatatcagttttaactggtagttccattagcctttccacttctgcagaataatcagaaattggttctttaccagaaaatccagctactataataggctcaccgatgatcattggcaaaatcctatattgtaccagattaatgagagcatatttcatttccaataattctgctagttcttgagacattgatttatttgatgaatctagttggttctctagatactctaccatttctgccgcatacaataacttgttagataaaatcagggttatcaaagtgtttagcgtggctagaatagtgggcttgcatgtattaaagaatgcggtagtatgagtaaaccgttttaacgaattatatagtctccagaaatctgtggcgttacatacatgagccgaatgacatcgaagattgtccaatatttttaatagctgctctttgtccattatttctatatttgactcgcaacaattgtagataccattaatcactgattcctttttcgatgccggacaatagcacaattgtttagctttggactctatgtattcagaattaatagatatatctcttaatacagattgcactatacattttgaaactatgtcaaaaattgtagaacgacgctgttctgcagccatttaactttaaataatttacaaaaatttaaaatgagcatccgtataaaaatcgataaactgcgccaaattgtggcatatttttcagagttcagtgaagaagtgtctataaatgtagactcgacggatgagttaatgtatatttttgccgccttgggcggatctgtaaacatttgggccattatacctctcagtgcatcagtgttctaccgcggagccgaaaatattgtgtttaatcttccggtgtccaaggtaaaatcgtgtttgtgtagttttcacaatgatgccatcatagatatagaacctgatctggaaaataatctagtaaaactttctagttatcatgtagtaagtgtcgattgtaacaaggaactgatgcctattaggacagatactactatttgtctaagtatagatcaaaagaaatcttacgtgtttaattttcacaagtatgaagaaaaatgttgtggtagaaccgtcattcatttagaatggttgttgggctttatcaagtgtattagtcagcatcagcatttggctattatgtttaaagatgacaatattattatgaagactcctggtaatactgatgcgttttccagggaatattctatgactgaatgttctcaagaactacaaaagttttctttcaaaatagctatctcgtctctcaacaaactacgaggattcaaaaagagagtcaatgtttttgaaactagaatcgtaatggataatgacgataacattctaggaatgttgttttcggatagagttcaatcctttaagatcaacatctttatggcgtttttagattaatactttcaatgagataaatatgggtggcggagtaagtgttgagctccctaaacgggatccgcctccgggagtacccactgatgagatgttattaaacgtggataaaatgcatgacgtgatagctcccgctaagcttttagaatatgtgcatataggaccactagcaaaagataaagaggataaagtaaagaaaagatatccagagtttagattagtcaacacaggacccggtggtctttcggcattgttaagacaatcgtataatggaaccgcacccaattgctgtcgcacttttaatcgtactcattattggaagaaggatggaaagatatcagataagtatgaagagggtgcagtattagaatcgtgttggccagacgttcacgacactggaaaatgcgatgttgatttattcgactggtgtcagggggatacgttcgatagaaacatatgccatcagtggatcggttcagcctttaataggagtgatagaactgtagagggtcaacaatcgttaataaatctgtataataagatgcaaacattatgtagtaaagatgctagtgtaccaatatgtgaatcatttttgcatcatttacgcgcacacaatacagaagatagcaaagagatgatcgattatattctaagacaacagtctgcggactttaaacagaaatatatgagatgtagttatcccactagagataagttagaagagtcattaaaatatgcggaacctcgagaatgttgggatccagagtgttcgaatgccaatgttaatttcttactaacacgtaattataataatttaggactttgcaatattgtacgatgtaatactagcgtgaacaacttacagatggataaaacttcctcattaagattgtcatgtggattaagcaatagtgatagattttctactgttcccgtcaatagagcaaaagtagttcaacataatattaaacattcgttcgacctaaaattgcatttgatcagtttattatctctcttggtaatatggatactaattgtagctatttaaatgggtgccgcggcaagcatacagacgacggtgaatacactcagcgaacgtatctcgtctaaattagaacaagaagcgaacgctagtgctcaaacaaaatgtgatatagaaatcggaaatttttatatccgacaaaaccatggatgtaacctcactgttaaaaatatgtgctctgcggacgcggatgctcagttggatgctgtgttatcagccgctacagaaacatatagtggattaacaccggaacaaaaagcatacgtgccagctatgtttactgctgcgttaaacattcagacaagtgtaaacactgttgttagagattttgaaaattatgtgaaacagacttgtaattctagcgcggtcgtcgataacaaattaaagatacaaaacgtaatcatagatgaatgttacggagccccaggatctccaacaaatttggaatttattaatacaggatctagcaaaggaaattgtgccattaaagcgttgatgcaattgacgactaaggccactactcaaatagcacctagacaagttgctggtacaggagttcagttttatatgattgttatcggtgttataatattggcagcgttgtttatgtactatgccaagcgtatgctgttcacatccaccaatgataaaatcaaacttattttagccaataaggaaaacgtccattggactacttacatggacacattctttagaacttctccgatggttattgctaccacggatatacaaaactgaaaatatattgataatattttaatagattaacatggaagttatcgctgatcgtctagacgatatagtgaaacaaaatatagcggatgaaaaatttgtagattttgttatacacggtctagagcatcaatgtcctgctatacttcgaccattaattaggttgtttattgatatactattatttgttatagtaatttatatttttacggtacgtctagtaagtagaaattatcaaatgttgttggtggcgctagtcatcacattaactattttttattactttatactataatagtactagactgacttctaacaaacatctcacctgccataaataaatgcttgatattaaagtcttctatttctaacactattccatctgtggaaaataatactctgacattatcgctaattgacacatcggtgagtgatatgcctataaagtaataatcttctttgggcacatataccagtgtaccaggttctaacaacctatttactggtgctcctgtagcatactttttctttaccttgagaatatccatcgtttgcttggtcaatagcgatatgtgattttttatcaaccactcgaaaaagtaattggagtgttcatatcctctacgggctattgtctcatggccgtgtatgaaatttaagtaacacgactgtggtagatttgttctatagagccggttgccgcaaatagatagaactaccaatatgtctgtacaaatgttaaacattaattgattaacagaaaaaacaatgttcgttctgggaatagaaaccagatcaaaacaaaattcgttagaatatatgccacgtttatacattgaatataaaataactacagtttgaaaaataacagtatcatttaaacatttaacttgcggggttaatctcacaactttactgtttttaaactgttcaaaatatagcatcgatccatgagaaatacgtttagccgcctttaatagaggaaatcccaccgcctttctggatctcaccaacgacgatagttctgaccagcaactcatttcttcatcatccacctgttttaacatataataggcaggagatagatatccgtcattgcaatattccttctcgtaggcacacaatctaatattgataaaatctccattctcttctctgcatttattatcttgtttcggtggctgattaggctgtagtcttggtttaggctttggtatatcgttgttgaatctattttggtcattaaatctttcatttcttcctggtatatttttatcacctcgtttggttggatttttgtctatattatcgtttgtaacatcggtacgggtattcatttatcacaaaaaaaacttctctaaatgagtctactgctagaaaacctcatcgaagaagataccatattttttgcaggaagtatatctgagtatgatgatttacaaatggttattgccggcgcaaaatccaaatttccaagatctatgctttctatttttaatatagtacctagaacgatgtcaaaatatgagttggagttgattcataacgaaaatatcacaggagcaatgtttaccacaatgtataatataagaaacaatttgggtctaggagatgataaactaactattgaagccattgaaaactatttcttggatcctaacaatgaagttatgcctcttattattaataatacggatatgactgccgtcattcctaaaaaaagtggtaggagaaagaataagaacatggttattttccgtcaaggatcatcacctatcttgtgtattttcgaaactcgtaaaaagattaatatttataaagaaaatatggaatccgcatcgactgagtatacacctatcggagacaacaaggctttgatatctaaatatgcgggaattaatatcctaaatgtgtattctccttccacatccataagattgaatgccatttacggattcaccaataaaaataaactagagaaacttagtactaataaggaactagaatcgtatagttctagccctcttcaagaacccattaggttaaatgattttctgggactattggaatgtgttaaaaagaatattcctctaacagatattccgacaaaggattgattactataaatggagaatgttcctaatgtatactttaatcctgtgtttatagagcccacgtttaaacattctttattaagtgtttataaacacagattaatagttttatttgaagtattcgttgtattcattctaatatatgtattttttagatctgaattaaatatgttcttcatgcctaaacgaaaaatacccgatcctattgatagattacgacgtgctaatctagcgtgtgaagacgataaattaatgatctatggattaccatggatgacaactcaaacatctgcgttatcaataaatagtaaaccgatagtgtataaagattgtgcaaagcttttgcgatcaataaatggatcacaaccagtatctcttaacgatgttcttcgcagatgatgattcattttttaagtatttggctagtcaagatgatgaatcttcattatctgatatattgcaaatcactcaatatctagactttctgttattattattgatccaatcaaaaaataaattagaagccgtgggtcattgttatgaatctctttcagaggaatacagacaattgacaaaattcacagactttcaagattttaaaaaactgtttaacaaggtccctattgttacagatggaagggtcaaacttaataaaggatatttgttcgactttgtgattagtttgatgcgattcaaaaaagaatcctctctagctaccaccgcaatagatcctattagatacatagatcctcgtcgcgatatcgcattttctaacgtgatggatatattaaagtcgaataaagtgaacaataattaattctttattgtcatcatgaacggcggacatattcagttgataatcggccccatgttttcaggtaaaagtacagaattaattagacgagttggtaccaaaaattgaaaataaatacaaaggttcttgagggttgtgttaaattgaaagcgagaaataatcataaatactgcagaccatggaaaccgacacacttttgctctgggtactcctgttgtgggtgccaggttcaacaggggatgaagtgcaactggtcgagagtggaggaggcctcgtgcaaccggggggatcacttcggctgagctgcgcagcatctggctttaccatctccgattactggatacactgggttagacaagcaccaggtaaagggctggagtgggtggcaggcatcacgccggcaggagggtacacctattacgctgattctgtgaaaggccgatttactataagtgcagacacgtctaagaatacggcttatctgcaaatgaattcccttagggcagaggatacagctgtttattactgtgctcggtttgtgttcttcctcccgtacgcaatggactactggggtcaagggaccctggttacagttagtagtgggggaggaggttccggaggtgggggaagtggtggcggtggatctgatatccaaatgactcagagcccaagctcactttcagcatctgtaggagatcgcgtgacaataacgtgtcgcgcgtctcaggatgtgtccacggcagtcgcatggtaccaacaaaagccggggaaagctcccaagttgctcatctattctgcctcttttctttatagtggggtaccgagcagattctccggtagtggctccggtaccgactttacgctcacaataagttcactccagcccgaggatttcgcgacctactattgtcaacaggggtatggcaacccattcactttcggacagggaactaaagtcgaaattaaacgcggtggtggaggatcagggggcggcggatctgggggaggggggagccaagttcaattggtcgaaagtggagccgaagtgaaaaagcccggggcgtcagtcaaggtaagttgtaaggcttctggttacactttcacgggttattatatgcattgggtgcgccaagccccggggcagggattggaatggatggggtggataaaccctaatagcggcggaacaaactacgcccagaagttccagggaagagtaaccatgacgagagataccagtatctcaacggcatatatggagctttctcgccttaggagtgacgatacagcagtctactattgtgctcgctctcccaatccatattattatgattcctctggctattactacccaggggcctttgatatatggggacagggaacaatggttaccgttagtagcggcggtggtggatctggcgggggaggctcaggtggaggtggttcacaacccggccttacgcagcccccaagcgtgagcgtcgccccaggccaaacagctaggataacgtgcggtggcaataacatcggaagtaaaagtgtccactggtatcagcagaaaccgggtcaggccccggtcctcgttgtctatgacgactctgaccggccctcaggaatcccggagcggttttcagggtctaactcaggtaacaccgcaactttgactatttcacgcgtcgaagcaggtgatgaagccgattactattgtcaggtgtgggacagcagctccgaccactacgtctttggtactggcactaaggtcacggtcctgggacaatgattaattaatttttataaaaattgaaattttattttttttttttggaatataaatactcgagaccatgttcataaacataaaatccattctttggatgtgttccacactgattgtgactcatgcgctccataaggtcaaggtggggaaaagtccgccggttagagggagtctttccggaaaagtgtctcttccatgccattttagcaccatgcctactttgccgccgtcctacaatacatccgaattccttcgcataaaatggtcaaaaatcgaggtcgataaaaatggaaaggatctgaaagagacgactgtcttggtcgcccaaaacggaaatataaaaatcggacaagattacaaaggccgcgtgtcagttccgacgcatcccgaggctgtaggagatgcgagcttgactgtcgtaaaattgctcgctagcgatgctggactttaccgatgtgacgtgatgtacggtatcgaagatactcaagacactgtatctctcacagtagatggggtcgtcttccactatagggcggcaacctcccggtatactctcaattttgaggcggcgcagaaggcatgtctcgacgtcggggctgttatcgccacaccggaacagctctttgccgcttatgaggatggtttcgagcaatgtgacgccggttggctcgccgatcagacggttcgatatcccattcgggcgccgagggtgggctgttatggagataagatgggcaaagcaggtgtcaggacatatggattccgcagcccacaggaaacgtatgatgtgtactgctacgttgatcatctggacggagatgtctttcacctgacggtgccctccaaattcacttttgaggaggccgctaaagaatgtgagaatcaggatgcacgactcgcgaccgtaggtgagctgcaagcggcgtggaggaatgggttcgatcagtgtgactacgggtggctgtcagacgcctctgtcaggcaccctgtaactgtcgcaagagcgcaatgcggcggggggctcctgggagtacgaacgctctacaggtttgaaaaccagactggttttcctccaccagattcacgctttgatgcatattgcttcaagcgacggatgtcagacctgagtgtgattggacatcccatagattcagagtctaaggaagacgagccctgctccgaagaaacggacccagtccacgatctgatggctgaaatcctccccgagttccctgatattatagaaatagatctttatcactctgaggaaaatgaagaggaagaagaggagtgcgcaaacgccacggatgttacaacgacccccagtgtccagtatatcaatggaaagcaccttgttacgacagttcctaaggacccagaagctgctgaatgattaattaatttttatgagctcggaggtaatgatatgtatcaatcggtgtgtagaaagtgttacatcgactcataatattatattttttatctaaaaaactaaaaataaacattgattaaattttaatataatacttaaaaatggatgttgtgtcgttagataaaccgtttatgtattttgaggaaattgataatgagttagattacgaaccagaaagtgcaaatgaggtcgcaaaaaaactaccgtatcaaggacagttaaaactattactaggagaattattttttcttagtaagttacagcgacacggtatattagatggtgccaccgtagtgtatataggatcggctcctggtacacatatacgttatttgagagatcatttctataatttaggagtgatcatcaaatggatgctaattgacggccgccatcatgatcctattttaaatggattgcgtgatgtgactctagtgactcggttcgttgatgaggaatatctacgatccatcaaaaaacaactgcatccttctaagattattttaatttctgatgtaagatccaaacgaggaggaaatgaacctagtacggcggatttactaagtaattacgctctacaaaatgtcatgattagtattttaaaccccgtggcatctagtcttaaatggagatgcccgtttccagatcaatggatcaaggacttttatatcccacacggtaataaaatgttacaaccttttgctccttcatattcagctgaaatgagattattaagtatttataccggtgagaacatgagactgactcgagttaccaaattagacgctgtaaattatgaaaaaaagatgtactaccttaataagatcgtccgtaacaaagtagttgttaactttgattatcctaatcaggaatatgactattttcacatgtactttatgctgaggaccgtgtactgcaataaaacatttcctactactaaagcaaaggtactatttctacaacaatctatatttcgtttcttaaatattccaacaacatcaactgaaaaagttagtcatgaaccaatacaacgtaaaatatctagcaaaaattctatgtctaaaaacagaaatagcaagagatccgtacgcggtaataaatagaaacgtgctactgagatatactaccgatatagagtataatgatttagttactttaataaccgttagacataaaattgattctatgaaaactgtgtttcaggtatttaacgaatcatccataaattatactccggttgatgatgattatggagaaccaatcattataacatcgtatcttcaaaaaggtcataacaagtttcctgtaaattttctatacatagatgtggtaatatctgacttatttcctagctttgttagactagatactacagaaactaatatagttaatagtgtactacaaacaggcgatggtaaaaagactcttcgtcttcccaaaatgttagagacggaaatagttgtcaagattctctatcgccctaatataccattaaaaattgttagatttttccgcaataacatggtaactggagtagagatagccgatagatctgttatttcagtcgctgattaatcaattagtagagatgagataagaacattataataatcaataatattatcttatatctcgtttagaaaaatgctaatattaaaatagctaacgctagtaatccaatcggaagccatttgatatctataatagggtatctaatttcctgattcagatagcggacagctatattctcggtagctactcgtttggaatcacaaacattatttacatctaatttactatctgtaatggaaacgtttcccaatgaaatggtacaatccgatacattgcattttgttatatttttttttaaagaggctggtaacaacgcatcgcttcgtttacatggctcgtaccaacaataatagggtaatcttgtatctattcctatccgtactatgcttttatcaggataaatacatttacatcgtatatcgtctttgttagcatcacagaatgcataaatttgttcgtccgtcatgataaaaatttaaagtgtaaatataactattatttttatagttgtaataaaaagggaaatttgattgtatactttcggttctttaaaagaaactgacttgataaaaatggctgtaatctctaaggttacgtatagtctatatgatcaaaaagagattaatgctacagatattatcattagtcatgttaaaaatgacgacgatatcggtaccgttaaagatggtagactaggtgctatggatggggcattatgtaaaacttgtgggaaaacggaattggaatgtttcggtcactggggtaaagtaagtatttataaaactcatatagttaagcctgaatttatttcagaaattattcgtttactgaatcatatatgtattcactgcggattattgcgttcacgagaaccgtattccgacgatattaacctaaaagagttatcgggacacgctcttaggagattaaaggataaaatattatccaagaaaaagtcatgttggaacagcgaatgtatgcaaccgtatcaaaaaattactttttcaaagaaaaaggtttgtttcgtcaacaagttggatgatattaacgttcctaattctctcatctatcaaaagttaatttctattcatgaaaagttttggccattattagaaattcatcaatatccagctaacttattttatacagactactttcccatccctccgctgattattagaccggctattagtttttggatagatagtatacccaaagagaccaatgaattaacttacttattaggtatgatcgttaagaattgtaacttgaatgctgatgaacaggttatccagaaggcggtaatagaatacgatgatattaaaattatttctaataacactaccagtatcaatttatcatatattacatccggcaaaaataatatgattagaagttatatcgtcgcccgacgaaaagatcagaccgctagatctgtaattggtcccagtacatctatcaccgttaatgaggtaggaatgcccgcatatattagaaatacacttacagaaaagatatttgttaatgcctttacagtggataaagttaaacaactattagcgtcaaaccaagttaaattttactttaataaacgattaaaccaattaacaagaatacgccaaggaaagtttatcaaaaataaaatacatttattgcctggtgattgggtagaagtagctgttcaagaatatacaagtattatttttggaagacagccgtctctacatagatacaacgtcatcgcttcatctatcagagctaccgaaggagatactatcaaaatatctcccggaattgccaactctcaaaatgctgatttcgacggagatgaagaatggatgatattggagcaaaatcctaaagccgtaattgaacaaagtattcttatgtatccgacgacgttactcaaacacgatattcatggagcccccgtttatggatctattcaagatgaaatcgtagcagcgtattcattgtttaggatacaagatctttgtttagatgaagtattgaacatcttggggaaatatggaagagagttcgatcctaaaggtaaatgtaaattcagcggtaaagatatctatacttacttgataggtgaaaagattaattatccgggtctcttaaaggatggtgaaattattgcaaacgacgtagatagtaattttgttgtggctatgaggcatctgtcattggctggactcttatccgatcataagtcgaacgtggaaggtatcaactttattatcaagtcatcttatgtttttaagagatatctatctatttacggttttggggtgacattcaaagatctgagaccaaattcgacgttcactaataaattggaggccatcaacgtagaaaaaatagaacttatcaaagaagcatacgccaaatatctcaacgatgtaagagacgggaaaatagttccattatctaaagctttagaggcggactatgtggaatccatgttatccaacttgacaaatcttaatatccgagagatagaagaacatatgagacaaacgctgatagatgatccagataataacctcctgaaaatggccaaagcgggttataaagtaaatcctacagaactaatgtatattctaggtacgtatggacaacaaaggattgatggtgaaccagcagagactcgagtattgggtagagtcttaccttactatcttccagactctaaggatccagaaggaagaggttacattcttaattctttaacaaaaggattaacgggttctcaatattacttttcgatgctggttgccagatctcaatctactgatatcgtctgtgaaacatcacgtaccggaacactggctagaaaaatcattaaaaagatggaggatatggtggtcgacggatacggacaagtagttataggtaatacgctcatcaagtacgccgccaattataccaaaattctaggctcagtatgtaaacctgtagatcttatctatccagatgagtccatgacttggtatttggaaattagtgctctgtggaataaaataaaacagggattcgtttactctcagaaacagaaacttgcaaagaagacattggcgccgtttaatttcctagtattcgtcaaacccaccactgaggataatgctattaaggttaaggatctgtacgatatgattcataacgtcattgatgatgtgagagagaaatacttctttacggtatctaatatagattttatggagtatatattcttgacgcatcttaatccttctagaattagaattacaaaagaaacggctatcactatctttgaaaagttctatgaaaaactcaattatactctaggtggtggaactcctattggaattatttctgcacaggtattgtctgagaagtttacacaacaagccctgtccagttttcacactactgaaaaaagtggtgccgtcaaacaaaaacttggtttcaacgagtttaataacttgactaatttgagtaagaataagaccgaaattatcactctggtatccgatgatatctctaaacttcaatctgttaagattaatttcgaatttgtatgtttgggagaattaaatccagacatcactcttcgaaaagaaacagataaatatgtagtagatataatagttaatagattatacatcaagagagcagaaataaccgaattagttgtcgaatatatgattgaacgatttatctcctttagcgtcattgtaaaggaatggggtatggagacattcattgaggacgaggataatattagatttactgtctacctaaatttcgttgaaccggaagaattgaatcttagtaagtttatgatggttcttccgggtgccgccaacaagggcaagattagtaaattcaagattcctatctctgattatacgggttatgacgacttcaatcaaacaaaaaagctcaataagatgactgtagaactcatgaatctaaaagaattgggttctttcgatttggaaaacgtcaacgtgtatcctggagtatggaatacatacgatatcttcggtatcgaggccgctcgtgaatacttgtgcgaagccatgttaaacacctatggagaagggttcgattatctgtatcagccttgtgatcttctcgctagtttactatgtgctagttacgaaccagaatcagttaataaattcaagttcggtgcagctagtactcttaagagagctacgttcggagacaataaagcattgttaaacgcggctcttcataaaaagtcagaacctattaacgataatagtagctgccacttttttagcaaggtccctaatataggaactggatattacaaatactttatcgacttgggtcttctcatgagaatggaaaggaaactatctgataagatatcttctcaaaagatcaaggaaatggaagaaacagaagacttttaattcttatcaataacatatttttctatgatctgtcttttaaacgatggattttccacaaatgcgcctctcaagtccctcatagaatgatacacgtataaaaaatatagcataggcaatgactccttatttttagacattagatatgccaaaatcatagccccgcttctatttactcccgcagcacaatgaaccaacacgggctcgtttcgttgatcacatttagataaaaaggcggttacgtcgtcaaaatatttactaatatcggtagttgtatcatctaccaacggtatatgaataatattaatattagagttaggtaatgtatatttatccatcgtcaaatttaaaacatatttgaacttaacttcagatgatggtgcatccatagcatttttataatttcccaaatacacattattggttacccttgtcattatagtgggagatttggctttgtgcatatctccagttgaacgtagtagtaagtatttatacaaacttttcttatccatttataacgtacaaatggataaaactactttatcggtaaacgcgtgtaatttagaatacgttagagaaaaggctatagtaggcgtacaagcagccaaaacatcaacacttatattctttgttattatattggcaattagtgcgctattactctggtttcagacgtctgataatccagtctttaatgaattaacgagatatatgcgaattaaaaatacggttaacgattggaaatcattaacggatagcaaaacaaaattagaaagtgatagaggtagacttctagccgctggtaaggatgatatattcgacttcaaatgtgtggatttcggcgcctattttatagctatgcgattggataagaaaacatatctgccgcaagctattaggcgaggtactggagacgcgtggatggttaaaaaggcggcaaaggtcgatccatctgctcaacaattttgtcagtatttgataaaacacaagtctaataatgttattacttgtggtaatgagatgttaaatgaattaggttatagcggttattttatgtcaccgcattggtgttccgattttagtaatatggaatagtgttagataaatgcggtaacgaatgttcctgtaaggaaccataacagtttagatttaacgttaaagatgagcataaacataataaacaaaattacaatcaaacctataacattaatatcaaacaatccaaaaaatgaaatcagtggagtagtaaacgcgtacataactcctggataacgtttagcagctgccgttcctattctagaccaaaaattcggtttcatgttttcgaagcggtgttctgcaacaagtcggggatcgtgttctacatatttggcggcgttatccagtatctgcctattgatcttcatttcgttttcgattctggctatttcaaaataaaatcccgatgatagacctccagactttataatttcatctacgatgttcagcgccgtagtaactctaataatataggctgataagctaacatcataccctcctgtatatgtgaatatggcatgatttttgtccattacaagctcggttttaactttattgcctgtaataatttctctcatctgtaggatatctatttttttgtcatgcattgccttcaagacgggacgaagaaacgtaatatcctcaataacgttatcgttttctacaataactacatattctacctttttattttctaactcggtaaaaaaattagaatcccatagggctaaatgtctagcgatatttcttttcgtttcctctgtacacatagtgttacaaaaccctgaaaagaagtgagtatacttgtcatcatttctaatgtttcctccagtccactgtataaacgcataatccttgtaatgatctggatcatccttgactaccacaacatttcttttttctggcataacttcgttgtcctttacatcatcgaacttctgatcattaatatgctcatgaacattaggaaatgtttctgatggaggtctatcaataactggcacaacaataacaggagttttcaccgccgccatttagttattgaaattaatcatatacaactctttaatacgagttatattttcgtctatccattgtttcacatttacatatttcgacaaaaagatataaaatgcgtattccaatgcttctctgtttaatgaattactaaaatatacaaacacgtcactgtctggcaataaatgatatcttagaatattgtaacaatttattttgtattgcacatgttcgtgatctatgagttcttcttcgaatggcataggatctccgaatctgaaaacgtataaataggagttagaataataatatttgagagtattggtaatatataaactctttagcggtataattagtttttttctctcaatttctatttttagatgtgatggaaaaatgactaattttgtagcattagtatcatgaactctaatcaaaatcttaatatcttcgtcacacgttagctctttgaagtttttaagagatgcatcagttggttctacagatggagtaggtgcaacaattttttgttctacacatgtatgtactggagccattgttttaactataatggtgcttgtatcgaaaaactttaatgcagatagcggaagctcttcgccgcgactttctacatcgtaattgggttctaacgccgatctctgaatggatactagttttctaagttctaatgtgattctctgaaaatgtaaatccaattcctccggcattatagatgtgtatacatcggtaaataaaactatagtatccaacgatcccttctcgcaaattctagtcttaaccaaaaaatcgtatataaccacggagatggcgtatttaagagtggattcttctaccgttttgttcttggatgtcatataggaaactataaagtccgcactactgttaagaatgattactaacgcaactatatagttcaaattaagcattttggaaacataaaataactctgtagacgatacttgactttcgaataagtttgcagacaaacgaagaaagaacagacctctcttaatttcagaagaaaactttttttcgtattcctgacgtctagagtttatatcaataagaaagttaagaattagtcggttaatgttgtatttcattacccaagtttgagatttcataatattatcaaaagacatgataatattaaagataaagcgctgactatgaacgaaatagctatatggttcgctcaagaatatagtcttgttaaacgtggaaacgataactgtatttttaatcacgtcagcggcatctaaattaaatataggtatatttattccacacactctacaatatgccacaccatcttcataataaataaattcgttagcaaaattattaattttagtgaaatagttagcgtcaactttcatagcttccttcaatctaatttgatgctcacacggtgcgaattccactctaacatcccttttccatgcctcaggttcatcgatctctataatatctagtttcttgcgtttcacaaacacgggctcgtctctcgcgatgagatctgtatagtaactatgtaaatgataactagatagaaagatgtagctatatagatgacgatcctttaagagaggtataataactttaccccaatcagataaactattgttatggtcttcggaaaaagaatttttataaatttttccagtattttccaaatatacgtacttgacatctaaaaaatccttaatgataataggaatggataatccgtctattttataaagaaatacatatcgcacattatacttttttttggaaatgggaataccgatgtgtctacataaatatgcaaagtctaaatattttttagagaatcttagttggtccaaattcttttccaagtacggtaatagatttttcatattgaacggtatcttcttaatctctggttctagttccgcattaaatgatgaaactaagtcactatttttataactaacgattacatcacctctaacatcatcatttaccagaatactgatcttcttttgtcgtaaatacatgtctaatgtgttaaaaaaaagatcatacaagttatacgtcatttcatctgtggtattcttgtcattgaaggataaactcgtactaatctcttctttaacagcctgttcaaatttatatcctatatacgaaaaaatagcaaccagtgtttgatcatccgcgtcaatattctgttctatcgtagtgtataacaatcgtatatcttcttctgtgatagtcgatacgttataaaggttgataacgaaaatatttttatttcgtgaaataaagtcatcgtaggattttggacttatattcgcgtctagtagatatgcttttatttttggaatgatctcaattagaatagtctctttagagtccatttaaagttacaaacaactaggaaattggtttatgatgtataatttttttagtttttatagattctttattctatacttaaaaaatgaaaataaatacaaaggttcttgagggttgtgttaaattgaaagcgagaaataatcataaattatttcattatcgcgatatccgttaagtttgtatcgtaatggcgtggtcaattacaaataaagcggatactagtagcttcacaaagatggctgaaatcagagctcatctaaaaaatagcgctgaaaataaagataaaaacgaggatattttcccggaagatgtaataattccatctactaagcccaaaaccaaacgagccactactcctcgtaaaccagcggctactaaaagatcaaccaaaaaggaggaagtggaagaagaagtagttatagaggaatatcatcaaacaactgaaaaaaattctccatctcctggagtcagcgacattgtagaaagcgtggccgctgtagagctcgatgatagcgacggggatgatgaacctatggtacaagttgaagctggtaaagtaaatcatagtgctagaagcgatctttctgacctaaaggtggctaccgacaatatcgttaaagatcttaagaaaattattactagaatctctgcagtatcgacggttctagaggatgttcaagcagctggtatctctagacaatttacttctatgactaaagctattacaacactatctgatctagtcaccgagggaaaatctaaagttgttcgtaaaaaagttaaaacttgtaagaagtaaatgcgtgcacttttttataaagatggtaaactctttaccgataataattttttaaatcctgtatcagacgataatccagcgtatgaggttttgcaacatgttaaaattcctactcatttaacagatgtagtagtatatgaacaaacgtgggaggaggcgttaactagattaatttttgtgggaagcgattcaaaaggacgtagacaatacttttacggaaaaatgcatgtacagaatcgcaacgctaaaagagatcgtatttttgttagagtatataacgttatgaaacgaattaattgttttataaacaaaaatataaagaaatcgtccacagattccaattatcagttggcggtttttatgttaatggaaactatgttttttattagatttggtaaaatgaaatatcttaaggagaatgaaacagtagggttattaacactaaaaaataaacacatagaaataagtcccgatgaaatagttatcaagtttgtaggaaaggacaaagtttcacatgaatttgttgttcataagtctaatagactatataagccgctattgaaactgacggatgattctagtcccgaagaatttctgttcaacaaactaagtgaacgaaaggtatacgaatgtatcaaacagtttggtattagaatcaaggatctccgaacgtatggagtcaattatacgtttttatataatttttggacaaatgtaaagtccatatctcctcttccatcaccaaaaaagttaatagcgttaactatcaaacaaactgctgaagtggtaggtcatactccatcaatttcaaaaagagcttacatggcaacgactattttagaaatggtaaaggataaaaattttttagatgtagtatctaaaactacgttcgatgaattcctatctatagtcgtagatcacgttaaatcatctacggatggatgatatagatctttacacaaataattacaagaccgataaatggaaatggataagcgtatgaaatctctcgcaatgacagctttcttcggagagctaaacacattagatattatggcattgataatgtctatatttaaacgccatccaaacaataccattttttcagtggataaggatggtcagtttatgattgatttcgaatacgataattataaggcttctcaatatttggatctgaccctcactccgatatctggagatgaatgcaagactcacgcatcgagtatagccgaacaattggcgtgtgtggatattattaaagaggatattagcgaatatatcaaaactactccccgtcttaaacgatttataaaaaaataccgcaatagatcagatactcgtatcagtcgagatacagaaaagcttaaaatagctctagctaaaggcatagattacgaatatataaaagacgcttgttaataagtaaatgaaaaaaaactagtcgtttataataaaacacaatatggatgccaacatagtatcatcttctactattgcaacgtatatagacgctttagcaaagaatgcttcagaattagaacagaggtctaccgcatacgaaataaataatgaattggaactagtatttattaagccgccattaattactttgacaaatgtagtgaatatctctacgattcaggaatcgtttattcgatttaccgttactaataaggaaggtgtcaaaattagaactaagattccattatctaaggtacatggtctagatgtaaaaaatgtacagttagtagatgctatagataacatagtttgggaaaagaaatcattagtgacggaaaatcgtcttcacaaagaatgcttgttgagactatcgacagaggaacgtcatatatttttggattacaagaaatatggatcctctatccgactagaattagtcaatcttattcaagcaaaaacaaaaaactttacgatagactttaagctaaaatattttctaggatccggtgcccaatctaaaagttctttgttgcacgctattaatcatccaaagtcaaggcctaatacatctctggaaatagaattcacacctagagacaatgaaaaagttccatatgatgaactaataaaggaattgacgactctatcacgtcatatatttatggcttctccagagaatgtaattctttctccgcctattaacgcacctataaagacttttatgttgcctaaacaagatatagtaggtctggatctggaaaatctatatgccgtaactaagactgacggcattcctataactatcagagttacatcaaacgggttgtattgttattttacacatcttgggtatattattagatatccagttaagagaataatagattccgaagtagtagtctttggtgaggcagttaaggataagaactggaccgtatatctcattaagctaatagagcctgtgaatgcaatcaatgatagactagaagaaagtaagtatgttgaatctaaactagtggatatttgtgatcggatagtattcaagtcaaagaaatatgaaggtccgtttactacaactagtgaagtcgtcgatatgttatctacatatttaccaaagcaaccagaaggtgttattctgttctattcaaagggacctaaatctaacattgattttaaaattaaaaaggaaaatactatagaccaaactgcaaatgtagtatttaggtacatgtccagtgaaccaattatctttggagaatcgtctatctttgtagagtataagaaatttagcaacgataaaggctttcctaaagaatatggttctggtaagattgtgttatataacggcgttaattatctaaataatatctattgtttggaatatattaatacacataatgaagtgggtattaagtccgtggttgtacctattaagtttatagcagaattcttagttaatggagaaatacttaaacctagaatcgataaaaccatgaaatatattaactcagaagattattatggaaatcaacataatatcatagtcgaacatttaagagatcaaagcatcaaaataggagatatctttaacgaggataaactatcggatgtgggacatcaatacgccaataatgataaatttagattaaatccagaagttagttattttacgaataaacgaactagaggaccgttgggaattttatcaaactacgtcaagactcttcttatttctatgtattgttccaaaacatttttagacgattccaacaaacgaaaggtattggcgattgattttggaaacggtgctgacctggaaaaatacttttatggagagattgcgttattggtagcgacggatccggatgctgatgctatagctagaggaaatgaaagatacaacaaattaaactctggaattaaaaccaagtactacaaatttgactacattcaggaaactattcgatccgatacatttgtctctagtgtcagagaagtattctattttggaaagtttaatatcatcgactggcagtttgctatccattattcttttcatccgagacattatgctaccgtcatgaataacttatccgaactaactgcttctggaggcaaggtattaatcactaccatggacggagacaaattatcaaaattaacagataaaaagacttttataattcataagaatttacctagtagcgaaaactatatgtctgtagaaaaaatagctgatgatagaatagtggtatataatccatcaacaatgtctactccaatgactgaatacattatcaaaaagaacgatatagtcagagtgtttaacgaatacggatttgttcttgtagataacgttgatttcgctacaattatagaacgaagtaaaaagtttattaatggcgcatctacaatggaagatagaccgtctacaaaaaactttttcgaactaaatagaggagccattaaatgtgaaggtttagatgtcgaagacttacttagttactatgttgtttatgtcttttctaagcggtaaataataatatggtatgggttctgatatccccgttctaaatgcattaaataattccaatagagcgatttttgttcctataggaccttccaactgtggatactctgtattgttaatagatatattaatacttttgtcgggtaacagaggttctacgtcttctaaaaataaaagtttgataacatctggcctgttcataaataaaaacttggcgattctatatatactcttattatcaaatctagccattgtcttatagatgtgagctactgtaggtgtaccatttgattttctttctaatactatatatttctctcgaagaagttcttgcacatcatctgggaataaaatactactgttgagtaaatcagttattttttttatatcgatattgatggacatttttatagttaaggataataagtatcccaaagtcgataacgacgataacgaagtatttatacttttaggaaatcacaatgactttatcagatcaaaattaacaaaattaaaggagcatgtatttttttctgaatatattgtgactccagatacatatggatctttatgcgtcgaattaaatgggtctagttttcagcacggtggtagatatatagaggtggaggaatttatagatgctggaagacaagttagatggtgttctacatccaatcatatatctgaagatatacccgaagatatacacactgataaatttgtcatttatgatatatacacttttgacgctttcaagaataaacgattggtattcgtacaggtacctccgtcgttaggagatgatagctatttgactaatccgttattgtctccgtattatcgtaattcagtagccagacaaatggtcaatgatatgatttttaatcaagattcatttttaaaatatttattagaacatctgattagaagccactatagagtttctaaacatataacaatagttagatacaaggataccgaagaattaaatctaacgagaatatgttataatagagataagtttaaggcgtttgtattcgcttggtttaacggcgtttcggaaaatgaaaaggtactagatacgtataaaaaggtatctaatttgatataatgaattcagtgactgtatcacacgcgccatatactattacttatcacgatgattgggaaccagtaatgagtcaattggtagagttttataacgaagtagccagttggctgctacgagacgagacgtcgcctattcctgataagttctttatacagttgaaacaaccgcttagaaataaacgagtatgtgtgtgcggtatagatccgtatccgaaagatggaactggtgtaccgttcgaatcaccaaattttacaaaaaaatcaattaaggagatagcttcatctatatctagattaaccggagtaattgattataaaggttataaccttaatataatagacggggttataccctggaattattacttaagttgtaaattaggagaaacaaaaagtcacgcgatctactgggataagatttccaagttactgctgcagcatataactaaacacgttagtgttctttattgtttgggtaaaacagatttctcgaatatacgggcaaagttagaatccccggtaactaccatagtgggatatcatccagcggctagagaccgtcaattcgagaaagatcgatcatttgaaattatcaacgttttactggaattagacaacaaggtacctataaattgggctcaagggtttatttattaatgctttagtgaaattttaacttgtgttctaaatggatgcggctattagaggtaatgatgttatctttgttcttaagactataggtgtcccgtcagcgtgcagacaaaatgaagatccaagatttgtagaagcatttaaatgcgacgagttagaaagatatattgagaataatccagaatgtacactattcgaaagtcttagggatgaggaagcatactctatagtcagaattttcatggatgtagatttagacgcgtgtctagacgaaatagattatttaacggctattcaagattttattatcgaggtgtcaaactgtgtagctagattcgcgtttacagaatgcggcgccattcatgaaaatgtaataaaatccatgagatctaatttttcattgactaagtctacaaatagagataaaacaagttttcatattatctttttagacacgtataccactatggatacattgatagctatgaaacgaacactattagaattaagtagatcatctgaaaatccactaacaagatcgatagacactgccgtatataggagaaaaacaactcttcgggttgtaggtactaggaaaaatccaaattgcgacactattcatgtaatgcaaccacctcatgataatatagaagattacctattcacttacgtggatatgaacaacaatagttattacttttctctacaacgacgattggaggatttagttcctgataagttatgggaaccagggtttatttcattcgaagacgctataaaaagagtttcaaaaatattcattaattctataataaactttaatgatctcgatgaaaataattttacaacggtaccactggtcatagattacgtaacaccttgtgcattatgtaaaaaacgatcgcataaacatccgcatcaactatcgttggaaaatggtgctattagaatttacaaaactggtaatccacatagttgtaaagttaaaattgttccgttggatggtaataaactgtttaatattgcacaaagaattttagacactaactctgttttattaaccgaacgaggagaccatatagtttggattaataattcatggaaatttaacagcgaagaacccttgataacaaaactaattttgtcaataagacatcaactacctaaggaatattcaagcgaattactctgtccaagaaaacgaaagactgtagaagctaacatacgagacatgttagtagattcagtggagaccgatacctatccggataaacttccgtttaaaaatggtgtattggacctggtagacggaatgttttactctggagatgatgctaaaaaatatatgtgtactgtatcaaccggatttaaatttgacgatacaaagttcgtcgaagacagtccagaaatggaagagttaatgaatatcattaacgatatccaaccattaacggatgaaaataagaaaaatagagagctatatgaaaaaacattatctagttgtttatgcggtgctaccaaaggatgtttaacattcttttttggagaaactgcaactggaaagtcgacaaccaaacgtttgttaaagtctgctatcggtgacctgtttgttgagacgggtcaaacaattttaacagatgtattggataaaggacctaatccatttatcgctaacatgcatttgaaaagatctgtattctgtagcgaactacctgattttgcatgtagtgggtcaaagaaaatcagatctgataatattaaaaagttgacagaaccttgtgtcattggaagaccgtgtttctccaataaaattaataatagaaaccatgcgacaatcattatcgatactaattacaaacctgtttttgataggatagataacgcattaatgagaagaattgccgtcgtgcgattcagaacacacttttctcaaccttctggtagagaggctgctgaaaataatgacgcgtacgataaagtcaaactattagacgaggggttagatggtaaaatacaaaataatagatatagattcgcatttctatacttgttggtgaaatggtacagaaaatatcatgttcctattatgaaactatatcctacacccgaagagattcctgactttgcattctatctcaaaataggtactctgttggtatctagctctgtaaagcatattccattaatgacggacctctccaaaaagggatatatattgtacgataatgtggtcactcttccgttgactactttccaacagaaaatatccaagtattttaattctagactatttggacacgatatagagagcttcatcaatagacataagaaatttgccaatgttagtgatgaatatctgcaatatatattcatagaggatatttcatctccgtaaatatatgctcatatatttatagaagatatcacatatctaaatgaataccggaattatagatttatttgataatcatgttgatagtataccaactatattacctcatcagttagctactctagattatctagttagaactatcatagatgagaacagaagcgtgttattgttccatattatgggatcaggtaaaacaataatcgctttgttgttcgccttggtagcttccagatttaaaaaggtttacattctagtgccgaacatcaacatcttaaaaattttcaattataatatgggtgtagctatgaacttgtttaatgacgaattcatagctgagaatatctttattcattccacaacaagtttttattctcttaattataacgataacgtcattaattataacggattatctcgctacaataactctatttttatcgttgatgaggcacataatatctttgggaataatactggagaacttatgaccgtgataaaaaataaaaacaagattccttttctactattgtctggatctcccattactaacacacctaatactctgggtcatattatagatttaatgtccgaagagacgatagattttggtgaaattattagtcgtggtaagaaagtaattcagacacttcttaacgaacgcggtgtgaatgtacttaaggatttgcttaaaggaagaatatcatattacgaaatgcctgataaagatctaccaacgataagatatcacggacgtaagtttctagatactagagtagtatattgtcacatgtctaaacttcaagagagagattatatgattactagacgacagctatgttatcatgaaatgtttgataaaaatatgtataacgtgtcaatggcagtattgggacaacttaatctgatgaataatttagatactttatttcaggaacaggataaggaattgtacccaaatctgaaaataaataatggcgtgttatacggagaagaattggtaacgttaaacattagttccaaatttaaatactttattaatcggatacagacactcaacggaaaacattttatatacttttctaattctacatatggcggattggtaattaaatatatcatgctcagtaatggatattctgaatataatggttctcagggaactaatccacatatgataaacggcaaaccaaaaacatttgctatcgttactagtaaaatgaaatcgtctttagaggatctattagatgtgtataattctcctgaaaacgatgatggtagtcaattgatgtttttgttttcatcaaacattatgtccgaatcctatactctaaaagaggtaaggcatatttggtttatgactatcccagatactttttctcaatacaaccaaattcttggacgatctattagaaaattctcttacgccgatatttctgaaccagttaatgtatatcttttagccgccgtatattccgatttcaatgacgaagtgacgtcattaaacgattacacacaggatgaattaattaatgttttaccatttgacatcaaaaagctgttatatctaaaatttaagacgaaagaaacgaatagaatatactctattcttcaagagatgtctgaaacgtattctcttccaccacatccatcaattgtaaaagttttattgggagaattggtcagacaatttttttataataattctcgtattaagtataacgataccaagttacttaaaatggttacatcagttataaaaaataaagaagacgctaggaattacatagatgatattgtaaacggtcacttctttgtatcgaataaagtatttgataaatctcttttatacaaatacgaaaacgatattattacagtaccgtttagactttcctacgaaccatttgtttggggagttaactttcgtaaagaatataacgtggtatcttctccataaaactgatgagatatataaagaaataaatgtcgagctttgttaccaatggataccttccagttacattggagccacacgagctgacgttagacataaaaactaatattaggaatgccgtatataagacgtatctccatagagaaattagtggtaaaatggccaagaaaatagaaattcgtgaagacgtggaattacctctcggcgaaatagttaataattctgtagttataaacgttccgtgtgtaataacctacgcgtattatcacgttggggatatagttagaggaacattaaacatcgaagatgaatcaaatgtaactattcaatgtggagatttaatctgtaaactaagtagagattcgggtactgtatcatttagcgattcaaagtactgcttttttcgaaatggtaatgcgtatgacaatggcagcgaagtcactgccgttctaatggaggctcaacaaggtatcgaatctagttttgtttttctcgcgaatatcgtcgactcataagaaagagaatagcggtaagtataaacacgaatactatggcaataattgcgaatgttttattcccttcgatatatttttgataatatgaaaaacatgtctctctcaaatcggacaaccatctcataaaatagttatctcgcgctggcgaggtggttgccgctcgtataatctccccagaataatatacttgcgtgtcgtcgttcaatttatacggatttctatagttctctgttatataatgcggttttccatcatgattagacgacgacaatagtgttctaaatttagatagttgatcagaatgaatgtttattggcgttggaaaaattatccatgctgcgtctgcagagtggttgatagttgttcctagatatgtaaaataatccaacgtactaggtagcaaattgtctagataaaatactgaatcaaacggcgcagacgtattagcggatctaatggaatccaattgattgactatcttttgaaaatatacatttttatgatccgatacttgtaagaatatagaaataatgataagtccatcatcgtgtttttttgcctcttcataagaactatattttttcttattccaatgaacaagattaatctctccagagtatttgtacacatctatcaagtgattggatccataatcgtcttcctttccccaatatatatgtagtgatgataacacatattcattggggagaaaccctccacttatatatcctcctttaaaattaatccttactagttttccagtgttctggatagtggttggtttcgactcattataatgtatgtctaacggcttcaatcgcgcgttagaaattgcttttttagtttctatattaataggagatagttgttgcggcatagtaaaaatgaaatgataactgtttaaaaatagctcttagtatgggaattacaatggatgaggaagtgatatttgaaactcctagagaattaatatctattaaacgaataaaagatattccaagatcaaaagacacgcatgtgtttgctgcgtgtataacaagtgacggatatccgttaataggagctagaagaacttcattcgcgttccaggcgatattatctcaacaaaattcagattctatctttagagtatccactaaactattacggtttatgtactacaatgaactaagagaaatctttagacggttgagaaaaggttctatcaacaatatcgatcctcactttgaagagttaatattattgggtggtaaactagataaaaaggaatctattaaagattgtttaagaagagaattaaaagaggaaagtgatgaacgtataacagtaaaagaatttggaaatgtaattctaaaacttacaacacgggataaattatttaataaagtatatataggttattgcatggcgtgttttattaatcaatcgttggaggatttatcgcatactagtatttacaatgtagaaattagaaagattaaatcattaaatgattgtattaacgacgataaatacgaatatctgtcttatatttataatatgctagttaatagtaaatgaacttttacagatctagtataattagtcagattattaagtataatagacgactagctaagtctattatttgcaaggatgactctcaaattattacactcacggcattcgttaaccaatgcctatggtgtcataaacgagtatccgtgtccgctattttattaactactgataacaaaatattagtatgtaacagacgagatagttttctctattctgaaataattagaactagaaacatgtttagaaagaaacgattatttctgaattattccaattatttgtccaaacaggaaagaagtatactatcgtcatttttttctctatatccagctactgctgataatgatagaatagacgctatttatccgggtggcatacccaaaaggggtgagaatgttccagagtgtctatccagggaaatcaaagaagaagttaatatagacaattcttttgtattcatagacactcggttttttattcatggtatcatagaagataccattatcaacaaattttttgaggtaattttctttgtcggaagaatatctctaacgagtgatcaaattattgatacctttaaaagtaatcatgaaatcaaggatctaatatttttagatccgaattcaggtaatggactccaatacgaaattgcaaaatatgctctagatactgcaaaacttaaatgttacggccatagaggatgttattatgaatcattaaaaaaattaactgaggatgattgattagaaaatataaattaatttaccatcgtgtatttttataacgggattgtccggcatatcatgtagatagttaccgtctacatcgtatactcgaccatctacgcctttaaatcctctatttattgacattaatctattagaattggaataccaaatattagtaccctcaattagtttattggtaatattttttttagacgatagatcgatggctcttgaaaccaaggttttccaaccggactcattgtcgatcggtgagaagtctttttcattagcatgaatccattctaatgatgtatgtttaaacactctaaacaattggacaaattcttttgatttgctttgaatgatttcaaataggtcttcgtctacagtaggcataccattagataatctagccattataaagtgcacgtttacatatctacgttctggaggagtaagaacgtgactattgagacgaatggctcttcctactatctgacgaagagacgcctcgttccatgtcatatctaaaatgaagatatcattaattgagaaaaaactaataccctcgcctccactagaagagaatacgcatgttttaatgcattctccgttagtgtttgattcttggttaaactcagccaccgccttgattctagtatcttttgttctagatgagaactctatattagagataccaaagactttgaaatatagtaataagatttctattcctgactgattaacaaatggttcaaagactagacatttaccatgggatgctaatattcccaaacatacatctataaatttgacgcttttctcttttaattcagtaaatagagagatatcagccgcactagcatcccctttcaatagttctccctttttaaaggtatttaatgcggatttagaaaactctctatctcttaatgaatttttaaaatcattatatagtgttgctatctcttgcgcgtattcgccgggatcacgattttgtctttcaggaaagctatcgaacgtaaacgtagtagccatacgtctcagaattctaaatgatgatataccagtttttatttctgcgagtttagccttttgataaatctcttcttgcttttttgacatattaacgtatcgcattaatactgttttcttagcgaatgatgcagacccttctacgttatcaaaaatagaaaactcgttattaactatgtacgaacataggcctcctagtttggagactaattctttttcatcgactagacgtttattctcaaatagtgattggtgttgtaaggatcctggtcgtagtaagttaaccaacatggtgaattcttgcacactattgacgataggtgtagccgataaacaaatcatcttatggttttttaatgcgatggtcttggataaaaaattatatactgaacgagtaggacggatcttaccatcttctttgattaatgatttagaaatgaagttatgacattcatcaataatgacgcatattctactcttggaattaatagttttgatattagtaaaaaatttatttctaaaattttgatcatcgtaattaataaaaatacaatccttcgttatctctggagcgtatctgagtatagtgttcatccaaggatcttctatcaaagcctttttcaccaataagataatagcccaattcgtataaatatccttaagatgtttgagaatatatacagtagtcattgttttaccgacacccgtttcatggaacaataaaagagaatgcatactgtctaatcctaagaaaactcttgctacaaaatgttgataatccttgaggcgtactacgtccgaccccatcatttcaacgggcatattagtagttctgcgtaaggcataatcgatataggccgcgtgtgatttactcatttatgagtgataagtaataactatgttttaaaaatcacagcagtagtttaactagtcttctctgatgtttgttttcgatactttttgaatcagaagtcatactagaataaagcaacgagtgaacgtaatagagagcttcgtatactctattcgaaaactctaagaacttattaatgaattccgtatccactggattgtttaaaatactaaattgaacactgttcacatccttccaagaagaagacttagtgacggacttaacatgagacataaataaatccaaattttttttacaaacatcactagccaccataatggcgctatctttcaaccagctatcgcttacgcattttagcagtctaacatttttaaagagactacaatatattctcatagtatcgattacacctctaccgaataaagttggaagtttaataatacaatatttttcgtttacaaaatcaaataatggtcgaaacacgtcgaaggttaacatcttataatcgctaatgtatagattgttttcagtgagatgattattagatttaatagcatctcgttcacgtttgaacagtttattgcgtgcgctgaggtcggcaactacggcgtccgctttagtactcctcccataatactttacgctattaatctttaaaatttcatagactttatctagatcgctttctggtaacatgatatcatgtgtaaaaagttttaacatgtcggtcggcattctatttagatcattaactctagaaatctgaagaaagtaattagctccgtattccagactaggtaatgggcttttacctagagacagattaagttctggcaatgtttcataaaatggaagaaggacatgcgttccctcccggatattttttacaatttcatccatttacaactctatagtttgttttcattattattagttattatctcccataatcttggtaatacttaccccttgatcgtaagataccttatacaggtcattacatacaactaccaattgtttttgtacataatagattggatggttgacatccatggtggaataaactactcgaacagatagtttatctttccccctagatacattggccgtaatagttgtcggcctaaagaatatctttggtgtaaagttaaaagttagggttcttgttccattattgctttttgtcagtagttcattataaattctcgagatgggtccgttctctgaatatagaacatcatttccaaatctaacttctagtctagaaataatatcggtcttattcttaaaatctattcccttgatgaagggatcgttaatgaacaaatccttggcctttgattcggctgatctattatctccgttatagacgttacgttgactagtccaaagacttacaggaatagatgtatcgatgatgttgatactatgtgatatgtgagcaaagattgttctcttagtggcatcactatatgttccagtaatggcggaaaactttttagaaatgttatatataaaagaattttttcgtgttccaaacattagcagattagtatgaagataaacactcatattatcaggaacattatcaatttttacatacacatcagcatcttgaatagaaacgataccatcttctggaacctcaacaatctcggcagactccggataaccagtcggtggaccatcgctaacaataactagatcatccaacaatctactcacatatgcatctatataatctttttcatcttgtgagtaccctggatacgaaataaatttattatccgtatttccataataaggtttagtataaacagagagcgatgttgccgcatgaacttcagttacagtcgccgttggttggtttatttgacctattactctcctaggtttctctataaacgatggtttaatttgtacattcttaaccatatatccaataaagctcaattcaggaacataaacaaattctttgttgaacgtttcaaagtcgaacgaagagtcacgaataacgatatcggatactggattgaaggttaccgttacggtaatttttgaatcggatagtttaagactgctgaatgtatcttccacatcaaacggagttttaatataaacgtatactgtagatggttctttaatagtgtcattaggagttaggccaatagaaatatcattaagttcactagaatatccagagtgtttcaaagcaattgtattattgatacaattattatataattcttcgccctcaatttcccaaataacaccgttacacgaagagatagatacgtgattaatacatttatatccaacatatggtacgtaaccgaatcttcccatacctttaacttctggaagttccaaactcagaaccaaatgattaagcgcagtaatatactgatccctaatttcgaagctagcgatagcctgattgtctggaccatcgtttgtcataactccggatagagaaatatattgcggcatatataaagttggaatttgactatcgactgcgaagacattagaccgtttaatagagtcatccccaccgatcaaagaattaatgatagtattattcattttctatttaaaatggaaaaagcttacaataaactccgtagagaaatatctataatttgtgagttttccttaaagtaacagcttccgtaaacgccgtctttatctcttagtaagtttattgtatttataaccttttccttatcttcatagaatactaaaggcaacaaagaaatttttggttcttctctaagagctacgtgagacttaaccatagaagccaacgaatccctacatattttagaacagaaataccctacttcaccacccttgtatgtctcaatactaataggtctaaaaaccaaatcttgattacaaaaccaacacttatcaattacactatttgtcttaatagacacatctgccatagatttataatactttggtagtatacaagcgagtgcttcttctttagcgggcttaaagactgctttaggtgctgaaataaccacatctggaaggcttactcgcttagccatttaattacggaactatttttttatacttctaatgagcaagtagaaaacctctcatctacaaaaacatactcgtgtccataatcctctaccatagttacacgttttttagatctcatatgtgctaaaaagttttcccatactaattggttactattatttttcgtataatttttaacagtttgaggttttagatttttagttacagaagtgatatcgaatattttatccaaaaagaatgaataattaattgtcttagaaggagtgttttcttggcaaaagaataccaagtgcttaaatatttctactacttcattaatcttttctgtactcagattcagtttctcatcttttacttgattgattatttcaaagactaacttataatcctttttatttattctctcgttagccttaagaaaactagatacaaaatttgcatctacatcatccgtggatatttgatttttttccatgatatccaagagttccgagataatttctccagaacattgatgagacaataatctccgcaatacatttctcaaatgaataagtttattagacacgtggaagtttgactttttttgtacctttgtacatttttgaaataccgactcgcaaaaaatacaatattcatatccttgttcagatactataccgttgtgtctacaaccgctacataatcgtagattcatgttaacactctacgtatctcgtcgtccaatattttatataaaaacattttatttctagacgttgccagaaaatcctgtaatacttttagttttttgggctgtgaataaagtatcgccctaatatggttaccgtcctccgccaatatagtagttaaattatccgcacatgcaaaagaacaccgcttaggcggattcagtacaatgttatatttttcgtaccaactcatttaaatatcataatctaaaatagttctgtaatatgtctagcgctaatatattgatcataatcctgtgcataaattaagatacaacaatgtctcgaaatcatcgacatggcttcttccatagttagaagatcgtcgtcaaagttagcaacgtgattcatcaacatttgctgttttgaggcagcaaatactgaaccgtcgccattcaaccattcataaaaaccatcgtctgaatccattgataatttcttgtactggtttttgagagctcgcatcaatctagcatttctagctcccggattgaaaacagaaagaggatcgtacatccagggtccattttctgtaaatagaatcgtataatgtcccttcaagaagatatcagacgatccacaatcaaagaattggtctccgagtttgtaacaaactgcggactttaacctatacatgataccgtttagcataatttctggtgatacgtcaatcggagtatcatctattagagatctaaagccggtgtaacattctccaccaaacatattcttattctgacgtcgttctacataaaacatcattgctccattaacgataacaggggaatgaacagcactacccatcacattagttcccaatggatcaatgtgtgtaactccagaacatcttccatagcctatgttaggaggagcgaacaccactcttccactattgccatcgaatgccatagaataaatatccttggaattgatagaaatcggactgtcggatgttgtgatcatcttcataggattaacaacgatgtatggtgccgcctgaagtttcatatcgtaactgatgccgttcataggtctagccacagaaaccaacgtaggtctaaatccaactatagacaaaatagaagccaatatctgttcctcatctgtcataacttgagagcatccagtatgaataatcttcattagatggggatctaccgcatcatcatcgttacaataaaaaattcccattctaatgttcataattgcttttctaatcatggtatgcatgtttgctctctgaatctctgtggaaattagatctgatacacctgtaatcactatcggattatcctccgtaagacgattaaccaacaacatataattataagactttacttttctaaattcataaagttgctggattaggctataggtgtctccatgtacatacgcgttctcgagcgcaggaagtttaataccgaatagtgccatcagaataggatgaatatagtaattagtttctggttttctataaataaaagacaaatcttgtgaactagacatatcggtaaaatgcatggattggaatcgtgtagtcgacagaagaatatgatgattagatggagagtatattttatctaactctttgagttggtcaccgattctaggactagctcgagaatgaataagtactaaaggatgagtacatttcacagaaacactagcattgttcaatgtgctctttacatgggtaaggagttgaaatagctcgtttctatttgttctgacaatatttagtttattcataatgttaagcatatcctgaatagtaaagttagatgtgtcatacttgttagtagttagatatttagcaattgcattcccatcatttctcaatctcgtactccaatcatgcgtggatgctacttcgtcgatggaaaccatacaatcctttttgataggctgttgagattgattatttcctgcacgtttaggtttggtacgttgatttctagcccctgcggatataaagtcatcgtctacaatttgggacaatgaattgcatacactacaagacaaagatttatcagaagtgtgaatatgatcttcatctaccaaagaaagagtttgattagtataactagattttagtcctgcgttagatgttaaaaaaacatcgctattgaccacggcttccattatttatattcgtagtttttactcgaaagcgtgattttaatatccaatcttattacttttggaatcgttcaaaacctttgactagttgtagaatttgatctattgccctacgcgtatactcccttgcatcatatacgttcgtcaccagatcgtttgtttcggcctgaagttggtgcatatctttttcaacactcgacatgagatccttaagggccatatcgtctagattttgttgagatgctgctcctggatttggattttgttgtgctgttgtacatactgtaccaccagtaggtgtaggagtacatacagtggccacaataggaggttgaggaggtgtaaccgttggagtagtacaagaaatatttccatccgattgttgtgtacatgtagttgttggtaacgtctgagaaggttgggtagatggcggtgtcgtcgtcttttgatctttattaaatttagagataatatcctgaacagcattgctcggcgtcaacgctggaaggagtgaactcgccggcgcatcagtatctgcagacagccaatcaaaaagattagacatatcagatgatgtattagtttgttgtcgtggttttggtgtaggagcagtactactaggtagaagaataggagccgatgtaggtgtcggaaccggctgtggagttatatgaatagttggttgtagcggttggataggctgtctgctggcggccatcatattatctctagctagttgttctcgcaactgtctttgataatacgactcttgagactttagtcctatttcaatcgcttcatcctttttcgtatccggatccttttcttcagaataatagattgacgactttggtgtagaggattctgccagcccctgtgagaacttgttaaagaagtccatttaaggctttaaaattgaattgcgattataagattaaatggcagacacagacgatattatcgactatgaatccgatgatctcactgaatacgaggatgatgaagaagaggaagaagatggagagtcactagaaactagtgatatagatcccaaatcttcttataagattgtagaatcagcatccactcatatagaagatgcgcattccaatcttaaacatatagggaatcatatatctgctcttaaacgacgctatactagacgtataagtctatttgaaatagcgggtataatagcagaaagctataacttgcttcaacgaggaagattacctctagtttcagaattttctgacgaaacgatgaagcaaaatatgctacatgtaattatacaagagatagaggagggttcttgtcctatagtcatcgaaaagaacggagaattgttgtcggtaaacgattttgacaaagatggtctaaaattccatctagactatattatcaaaatttggaaacttcaaaaacgatattagaatttatacgaatatcgttctctaaatgtcacaatcaagtctcgcatgttcagcaatttattgtcgtactttatatcgtgttcattaacgatatcttgcaaaatagtaatgattctatcttccttcgatagatattcttcagagattattgtcttatattctttcttgttatcagatatgaatttgataagactttgaacattattgatacccgtctgtttaattttttctacagatattttagttttggcagattctatcgtatctgtcaatagacatccaacatcgacattcgacgtcaattgtctataaatcaacgtataaattttagaaataacattagcgaattgttgtgcattgatgtcgttattctgaaacagtatgattttaggtagcattttcttaacaaagagaacgtatttattgttactcagttgaacagatgatatatccagattactaacgcatctgattccgtataccaaactttcagaagaaatggtatacaattgtttgtattcattcaatgtctctttttcagaaattagtttagagtcgaatactgcaataattttcaagagatagttttcatcagataagattttatttagtgtagatatgataaaactattgttttgttggagaacttgatacgccgcgttctctgtagtcgacgctctcaaatgggaaacgatctccattatttttttggaatcggatactatatcttcggtatcttgacgcagtctagtatacatagagttaagagagattagagtttgtacattaagcaacatgtctctaaatgtggctacaaacttttccttttccacatcatctagtttattatataccgatttcacaacggcaccagatttaaggaaccagaatgaaaaactctgataactacaatatttcatcatagttacgattttatcatcttctatagttggtgtaatagcgcatacctttttctccaagactggaaccaacgtcataaaaatgtttaaatcaaaatccatatcaacatctgatgcgctaagaccagtctcgcgttcaagattatctttactaatggtgacgaactcatcgtatagaactctaagtttgtccattatttatttacagatttagttgtttaatttatttgtgctcttccagagttgggatagtatttttctaacgtcggtattatattattaggatctacgttcatatgtatcataatattaatcatccacgttttgataaatctatctttagcttctgaaataacgtatttaaacaaaggagaaaaatatttagctacggcatcagacgcaataacattttttgtaaatgtaacgtatttagacgacagatcttcgttaaaaagttttccatctatgtagaatccatcagttgttaacaccattcccgcgtcagattgaataggagtttgaatagtttgttttggaaatagatccttcaataacttatagttgggtgggaaaaaatcgattttatcactagactctttcttttttactatcattacctcatgaactatttcttgaatgagtatatgtattttctttcctatatcggacgcgttcattggaaaatataccatgtcgttaactataagaatatttttatcctcgtttacaaactgaataatatcagatgtagttcgtaaacgaactatatcatcaccagcacaacatctaactatatgatatccactagtttcctttagtcgtttattatcttgttccatattagcagtcattccatcatttaagaaggcgtcaaagataatagggagaaatgacattttggattctgttacaactttaccaaaattaaggatatacggacttactatctttttctcaacgtcaatttgatgaacacacgatgaaaatgtacttcgatgagattgatcatgtagaaaacaacaagggatacaatatttccgcatatcatgaaatatattaagaaatcccaccttattatatttccccaaaggatccatgcacgtaaacattatgccgttatcattaataaagacttctttctcatcggatctgtaaaagttgttactgatttttttcattccaggatctagataattaataatgatgggttttctattcttattctttgtattttggcatatcctagaccagtaaacagtttccactttggtaaaatcagcagacttttgaacgctattaaacatggcattaatggcaataactaaaaatgtaaaatatttttctatgttaggaatatggtttttcactttaatagatatatggtttttggccaaaatgatagatatttttttatccgaggatagtaaaatattattagtcgccgtctctataaaaatgaagctagtctcgatatccaattttattctagaattgataggagtcgccaaatgtaccttatacgttatatctcccttgatgcgttccatttgtgtatctatatcggacacaagatctgtaaatagttttacgttattaatcatcacggtatcgccgtcgctagataatgctaatgtaccatccaagtcccaaatggagagatttaactgttcatcgtttagaataaaatgattaccggtcatattaataaagtgttcatcgtatctagataacaacgacttataattaatgtccaagtcttgaactcgctgaatgatcttttttaacccagttagttttagattggtacgaaatatattgttaaactttgattctacagtaatgtccaaatctagttgtggaaatacttccatcaacattgtttcaaacttgataatattattatctacatcttcatacgatccaaattccggaatagatgtatcacatgctcttgccacccagataaccaaaaagtcacacgctccaggatatacattgtataaaaagctatcgtttttaagtagggtttttttctgcgtgtatacgaagggattaaaaatagtattatcaacgtaactatattccaaattattcttatgagaatagataataatatcgtccttaatatctaacaaatttcctaaatatccctttaattgagtcattcgaagcgtcaatagaatatgtctcttaactatttccggctgttgtatatttaaatgacttcgtaaaaaataatatatgggcgacttctcatctatgtaatcatatggagtgagatatagggctcgttctacctcctgccccttacccacctgtaataccaattgcggacttactatatatcgcatatttatatcgtggggtaaagtgaaaatctactaccgatgatgtaagtcttacaatgttcgaaccagtaccagatcttaatttggaggcctccgtagaactaggggaggtaaatatagatcaaacaacacctatgataaaggaaaatagcggttttatatcccgtagtagacgtctattcgcccatagatctaaggatgatgagagaaaactagcactacgattctttttacaaagactttattttttagatcatagagagattcattatttgttcagatgcgttgacgctgtaaaagacgtcactattaccaaaaaaaataacattatcgtggcgccttatatagcacttttaactatcgcatcaaaaggatgcaaacttacagaaacaatgattgaagcattctttccagaactatataatgaacatagtaagaaatttaaattcaactctcaagtatccatcatccaagaaaaactcggataccagtttggaaactatcacgtttatgattttgaaccgtattactctacagtagctctggctattcgagatgaacattcatctggcatttttaatatccgtcaagagagttatctggtaagttcattatctgaaataacatatagattttatctaattaatctaaaatctgatcttgttcaatggagtgctagtacgggcgctgtaattaatcaaatggtaaatactgtattgattacagtgtatgaaaagttacaactggtcatagaaaatgattcacaatttacatgttcattggctgtggaatcagaacttccaataaaattacttaaagatagaaatgaattatttacaaaattcatcaacgagttaaaaaagaccagttcattcaagataagcaaacgcgataaggatacgctactaaaatattttacttaggactggagttagaatttatagacgactcatttcgtttatcattattactaccatcattattagtattcttcttgttatcttgttcagaaatatacagcaatgctatgcctaatactaaatacattatcatgcttgcaatggctctaacaacgacgaaccaaaatgaatttggtcgtagcttttgttcacaaaaatacataaagaaatgtctacataaatctatggcgccattggctacttgaaatagcgccagtcctcctacagattttaatatagctgtataacatgacatttattcatcatcaaaagagacagagtcaccatctgtcatatttagattttttttcatgtgttcaaagtatcctctactcatttcattataatagtttatcatacttagaattttaggacggatcaatgagtaagacttgactagatcgtcagtagtaatttgtgcatcgtctattctgcatccgcttcgtcgaataatgtatagcatcgctttgagattctccatagctatcaagtctttatacaatgacatggaaatatctgtgaatactttatacttctccaacatcgatgccttaacatcatcgcctactttagcattgaaaatacgttctattgtgtagatggatgtagcaagatttttaaacaacaatgccatcttacacgatgattgcctcaagtctccaatcgtttgtttagaacgattagctacagagttcaacgcttggctgactagcatattattatctttagaaattgtattcttcaatgaagcgtttatcatatctgtgatttcgttagtcatattacagtctgactgggttgtaatgttatccaacatatcacctatggatacggtacacgtaccagcatttgtaataatcctatctaagatgttgtatggcattgcgcagaaaatatcttctcctgtaatatctccactctcgataaatctactcagattattcttaaatgccttattctctggagaaaagatatcagtgtccatcatttcattaatagtatacgcagaaaagataccacgagtatcaattctatccaagatacttatcggttccgagtcacagataatggtttcctctccttcgggagatcctgcatagaaatatctaggacaatagtttctatactgtctgtaactctgataatctctaaagtcactaactgataccatgaaattgagaagatcaaacgctgaagtaatcaatttttctgcctcgtttttactacaactagttttcatcaatgtagtgacgatgtattgtttagttactcttggtctaatactgatgatagagatattattacttcccataatggatcttctagtagtcaccttaaagcccattgatgcaaatagcagatagataaagtcttggtatgactcctttctaatatagtacggactacctttgtcacccaactttatacccacataagccataacaacctctttaatagccgtttcatgaggtttatcagccatgagcctgagtagttggaagaatctcatgaatcccgtctcagaaagtcctatatgcatgatagatttatctttcctgggaaactctcgtatagtcatagatgaaatactcttcaaagtttctgaaataagattagtaacagtcttacctccgactactctgggtaacaaacatactctaataggtgttttctctgcggagataatatcagaaaggatagagcaataagtagtattattgtgattataaagaccgaatacataacaggtagaatttataaacatcatgtcctgaaggtttttagacttgtattcctcgtaatccataccgtcccaaaacatggatttggtaactttgatagccgtagatctttgttccttcgccaacaggttaaagaaattaataaagaatttgttgtttctatttatgtccacaaattgcacgtttggaagcgtaactgttacgttcactgcagcattttgaggatcgcgagtatgaagtacgatgttattgtttactggtatatctggaaagaaatctaccagtctaggaataagagattgatatcgcatagaaatagtaaagtttataatctcatcatcgaagagcattttgttaccattgtaataaatatccactctgtcatatgtataaatgaagtactgttcaaacatgatgagatgtttatatgttggcatagtagtgagatcgacgtttggtaatggcaatgtattaagattaactccataatgtctagcagcatctgcgatgttataagtgtcgtcaaagcggggtcgatcttgtgctgttatatattgtctaacacctataagattatcaaaatcttgtctgcttaatacaccgttaacaatttttgccttgaattcttttattggtgcattaataacatccttatagaggatgttaaacaaataagtgttatcaaagttaagatctggatatttcttttctgctagaacatccattgagtcggagccatctggtttaatataaccaccgataaatctagctctgtattctgtatccgtcaatctaatattaagaaggtgttgagtgaaaggtggaagatcgtaaaagctgtgagtattaatgataggattagtttccgaactaatgttaattggggtattaataatatctatatttccagcgttaagtgtaacattaaacagttttaattcacgtgacgtggtatcaattaaataattaatgcccaatttggatatagcagcctgaagctcatcttgtttagttacggatcctaatgagttattaagcaatatatcgaacggatgaacgaaggttgttttaagttggtcacatactttgtaatctagacatagatgcggaagaacggtagaaactatacgaaataaatattcagagtcctctaattgatcaagagtaactattgacttaataggcatcatttatttagtattaaatgacgaccgtaccagtgacggatatacaaaacgatttaattacagagttttcagaagataattatccatctaacaaaaattatgaaataactcttcgtcaaatgtctattctaactcacgttaacaacgtggtagatagagaacataatgccgccgtagtgtcatctccagaggaaatatcctcacaacttaatgaagatctatttccagatgatgattcaccggccactattatcgaacgagtacaacctcatactactattattgacgatactccacctcctacttttcgtagagagttattaatatcggaacaacgtcaacaacgagaaaaaagatttaatattacagtatcgaaaaatgctgaagcaataatggaatctagatctatgataacttctatgccaacacaaacaccatccttgggagtagtttatgataaagataaaagaattcagatgttagaggatgaagtggttaatcttagaaatcaacgatctaatacaaaatcatctgataatttagataattttaccaaaatactatttggtaagactccgtataaatcaacagaagttaataagcgtatagccatcgttaattatgcaaatttgaacgggtcccccttatcagttgaggacttggatgtttgttcggaggatgaaatagatagaatctataaaacgattaaacaatatcacgaaagtagaaaacgaaaaattatcgtcactaacgtgattattattgtcataaacattatcgagcaggcattgctaaaactcggatttgaagaaatcaaaggactgagtaccgatatcacttcagaaattatcgatgtggagatcggagatgactgcgatgctgtagcatctaaactaggaatcggtaacagtccggttcttaatattgtattgtttatactcaagatattcgttaaacgaattaaaattatttaatttaatacattcccatatccagacaacaatcgtctggattaatctgttcctgtcgtctcataccggacgacatattaatctttttattagtaggcatctttttagatggtttctttttcccagcattaactgagtcgatacctagaagatcgtgattgatctctccgaccattccacgaacttctaattggccgtctctgacggtaccataaactattttaccagcattagtaacagcttggacaatctgaccatccattgcgttgaatgatgtagttgctgttgttctacgtttaggagcaccagaagtatttttggagcccttggaggctgatgtagaagaagacgaggattttgatttacatgtaatacattttgtactctttgattttgtatcacatgcgccggcagtcacatttgtttgagaattaagattattgttgcctcctttgacggctgcatctccaccgatttgcgctagtagatttttaagctgtggtgtaatcttattaactgtttcgatataatcatcgtaactgcttctaacggctaaattttttttatccgccatttagaagctaaaaatatttttatttatgcagaagatttaactagattatacaatgaactaatatgatccttttccagattatttacaaacttggtattttttggttctggaggaggcgaatttaaattcggacttggattcggattttgtgagttcttgatcttattatacatcgagtataggatggcgacggtaactgctacgcaaataccgatcaacaaaagaataccaatcatttattgacaataacttcactattgatcaagtatgcaatatatcatcttttcactaaataagtagtaataatgattcaacaatgtcgagatatatggacgataataatttagttcatggaaatatcgctatgattggtatgaatgactccgctaactctgtggggtgcgcagtgctttccccacatagaataaattagcattccgactgtgataataataccaagtataaacgccataatactcaatactttccatgtacgagtgggactggtagacttactaaagtcaataaaggcgaagatacacgaaagaatcaaaagaatgattccagcgattagcacgccggaaaaataatttccaatcataagcatcatgtccatttaactaataaaaattttaaatcgccgaatgaacaaagtggaatataaaccatataaaaacaatagtttgtactgcaaaaataatatctatttttgttttcgaagatatggtaaaattaaatagtagtacacagcatgttataactaacagcagcaacggctcgtaattacttatcatttactagacgaaaaggtggtgggatattttcttgctcaaataatacgaatatatcacccatccattttatgcgatgtttatatactctaatctttaatagatctatagacgacgggtttaccaacaatatagattttatcgattcatctaatttaaacccttccttaaacgtgaatgatctattatctggcataacgatgactctacctgatgaatcggacaatgtactgggccatgtagaataaattatcaacgaattatcgtctacgaacatttatatcatttgttttaattttaggacgcgaataaatggatataaaatagaaaataacagatattacaaccaatgttatggccgcgcccaaccaggtaggcagttttattttatcttttactacaggttctcctggatgtacgtcaccaacggcggacgtagttctagtacaattagacgtaagttctgcttgggaattttttaacgctaaagagttaacgttaatcgtgcacccaacgtatttacatctagttctttgaacatcttgattataatataaccattttctatctctagattcgtcggtgcactcatgtaaccaacataccctaggtcctaaatatttatctccggaattagattttggataattcgcgcaccaacaatttctatttcctttatgatcgttacaaaagacgtataatgccgtatccccaaaagtaaaataatcaggacgaataattctaataaactcagaacaatatctcgcatccatatgtttggagcaaatatcggaataagtagacatagccggtttccgttttgcacgtaaccattctaaacaattggggtttccaggatcgtttctacaaaatccagtcatgaaatcatcacaatgttctgtcttgtaattattattaaatatttttggacagtgtttggtatttgtcttagaacaacattttgccacgctatcactatcgcccaggagataatccttttttataaaatgacatcgttgcccggatgctatataatcagtggcgtgttttaaatccttaatatattcaggagttacctcgttctgataatagattaatgatccaggacgaaatttgaaagaactacatggttctccatgaattaatacatattgtttagcaaattcaggaactataaaactactacaatgatctatcgacataccatctatcaaacaaaacttgggtttaatttctcccggagatgtttcataatagtacgtataactttcttctgcaaacttaacagctctattatattcaggataattaaaacctaattccatatatttgtctcgtatatctgctattcctggtgctattttaattctattaagagtaacggctgcccccattcttaataatcgtcagtatttaaactgttaaatgttggtatatcaacatctaccttatttcccgcagtataaggtttgttgcaggtatactgttcaggaatggttacatttatacttcttctatagtcctgtctttcgatgttcatcacatatgcaaagaacagaataaacaaaataatgtaagaaataatattaaatatctgtgaattcgtaaatacattgattgccataataattacagcagctacaatacatacaatagacattcccacagtgttgccattacctccacgatacatttgagttactaagcaataggtaataactaagctagtaagaggcaatagaaaagatgagataaatatcatcaatatagagattagaggagggctatatagagccaagacgaacaaaatcaaaccgagtaacgttctaacatcattatttttgaagattcccaaataatcattcattcctccataatcgttttgcattatacctccatctttaggcataaacgattgctgctgttcctctgtaaataaatctttatcaagcactccagcacccgcagagaagtcgtcaagcatattgtaatatcttaaataactcatttatatattaaaaaatgtcactattaaagatggagtataatctttatgccgaactaaaaaaaatgacttgtggtcaacccctaagtctttttaacgaagacggggatttcgtagaagttgaaccgggatcatcctttaagtttctgatacctaagggattttacgcctctccttccgtaaagacgagtctagtattcgagacattaacaacgaccgataataaaatcactagtatcaatccaacaaatgcgccaaagttatatcctcttcaacgcaaagtcgtatctgaagtagtttctaatatgaggaaaatgatcgaatcaaaacgtcctctatacattactcttcacttggcgtgtggatttggtaagactattaccacgtgttatcttatggctacacacggtagaaaaaccgtcatttgcgtacccaataaaatgttaatacatcaatggaagacacaggtagaggcagtcggattggaacataagatatctatagatggagtaagtagtctattaaaggaactaaagactcaaagtccggatgtattaatagtagtcagtagacatctgacaaacgatgccttttgtaaatatatcaataagcattatgatttgttcatcttggatgaatcacatacgtataatctgatgaacaatacagcagttacaagatttttagcgtattatcctccgatgatgtgttattttttaactgctacacctagaccagctaaccgaatttattgtaacagtattattaatattgccaagttatccgatctaaaaaaaactatctatgcggtagatagtttttttgagccatattccacagacaatattagacatatggtaaaacgactagatggaccatctaataaatatcatatatatactgagaagttattatctgtagacgagcctagaaatcaacttattcttgataccctggtagaagaattcaagtcaggaactattaatcgaattttagttattactaaactacgtgaacatatggtattcttctacaaacgattattagattttttcggatcagaggttgtatttataggagacgcccaaaatagacgtactccagatatggtcaaatcaatcaaggaactaaatagatttatattcgtatccaccttattttattccggtactggtttagatattcctagtttggattcgttgttcatttgctcggcagtaatcaacaatatgcaaatagagcaattactagggagggtatgtcgagaaacagaactattagataggacggtatatgtatttcctaacacatccatcaaagaaataaagtacatgataggaaatttcatgcaacgaattattagtctgtctgtagataaactaggatttaaacaaaaaagttatcggaaacatcaagaatccgatcccacttctgtatgtacaacatcctccagagaagaacgtgtattaaatagaatatttaactcgcaaaatcgttaagaagtttaagcgacgatccgcatgctgcgcaggccagtgtattacccctcatagtattaatataatccaatgatacttttgtgatgtcggaaatcttaaccaatttagactgacaggcagaacacgtcatgcaatcatcatcgtcatcgataactgtagtcttgggcttctttttgcggctcttcattccggaacgcacattggtgctatccatttaggtagtaaaaaataagtcagaatatgccctatagcacgatcgtgcaaaacctggtatatcgtctctatctttatcacaatatagtgtatcgacatttttattattattgacctcgtttatcttggaacatggaatgggaacatttttgttatcaacggccatctttgccttaattccagatgttgtaaaattataactaaacagtctatcatcgacacaaatgaaattcttgtttagacgtttgtagtttacgtatgcggctcgttcgcgtctcattttttcagatattgcaggtactataatattaaaaataagaatgaaataacataggattaaaaataaagttatcatgacttctagcgctgatttaactaacttaaaagaattacttagtctgtacaaaagtttgaaattttcagattctgcggctatagaaaagtataattctttggtagaatggggaacatctacttactggaaaataggcgtgcaaaaggtagctaatgtcgagacgtcaatatctgattattatgatgaggtaaaaaataaaccgtttaatattgatccgggatattacattttcttaccggtatattttggaagcgtctttatttattcgaagggtaaaaatatggtagaacttggatctggaaactcttttcaaataccagatgatatgcgaagtgcgtgtaacaaagtattagacagcgataacggaatagactttctgagatttgttttgttaaacaatagatggataatggaagatgctatatcaaaatatcagtctccagttaatatatttaaactagctagtgagtacggattaaacatacccaaatatttagaaattgaaatagaggaagacacattatttgacgacgagttatactctattatagaacgctctttcgatgataaatttccaaaaatatccatatcgtatattaagttgggagaacttagacggcaagttgtagactttttcaaattctcgttcatgtatattgagtccatcaaggtagatcgtataggagataatatttttattcctagcgttataacaaaatcaggaaaaaagatattagtaaaagatgtagaccatttaatacgatccaaggttagagaacatacatttgtaaaagtaaaaaagaaaaacacattttccattttatacgactatgatggaaacggaacagaaactagaggagaagtaataaaacgaattatagacactataggacgagactattatgttaacggaaagtatttctctaaggttggtagtgcaggcttaaagcaattgactaataaattagatattaatgagtgcgcaactgtcgatgagttagttgatgagattaataaatccggaactgtaaaacgaaaaataaaaaaccaatcagcatttgatttaagcagagaatgtttgggatatccagaagcggattttataacgttagttaataacatgcggttcaaaatagaaaattgtaaggttgtaaatttcaatattgaaaatactaattgtttaaataacccgagtattgaaactatatatggaaactttaaccagttcgtctcaatctttaatatcgtcaccgatgtcaaaaaaagattattcgagtgaaataatatgcgcctttgatataggtgcaaaaaatcctgccagaactgttttagaagtcaaggataactccgttagggtattggatatatcaaaattagactggagttctgattgggaaaggcgcatagctaaagatttgtcacaatatgaatacactacagttcttctagaacgtcagcctagaaggtcgccgtacgtcaaatttatctattttattaaaggctttttatatcatacatcggctgccaaagttatttgcgtctcgcctgtcatgtctggtaattcatatagagatcgaaaaaagagatcggtcgaagcatttcttgattggatggacacattcggattgcgagactccgttccggatagacgcaaattagacgatgtagcggatagtttcaatttggctatgagatacgtattagataaatggaatactaattatacaccttataataggtgtaaatctagaaattacataaaaaaaatgtaataacgttagtaacgccattatggataatctatttacctttctacatgaaatagaagatagatatgccagaactatttttaactttcatctaataagttgcgatgaaataggagatatatatggtcttatgaaagaacgcatttcctcagaggatatgtttgataatatagtgtataataaagatatacatcatgccattaagaaactagtgtattgcgacatccaacttactaaacacattattaatcagaatacgtatccggtatttaacgattcttcacaagtgaaatgttgtcattatttcgacataaactcagataatagcaatattagctctcgtacagtagagatatttgagagggaaaagtcatctcttgtatcatatattaaaactaccaataagaagagaaaggtcaattacggcgaaataaagaaaactgttcatggaggcactaatgcaaattacttttccggtaaaaagtctgacgagtatctgagtactacagttagatccaacattaatcaaccttggatcaaaaccatctctaagaggatgagagttgatatcattaatcactctatagtaacgcgtggaaaaagctctatattacaaactatagaaattatttttactaatagaacatgtgtgaaaatattcaaggattctactatgcacattattctatccaaggacaaggatgaaaaggggtgtatacacatgattgacaaattattctatgtctattataatttatttctgttgttcgaggatatcatccaaaacgagtactttaaagaagtagctaatgttgtaaaccacgtacttacggctacggcattagatgagaaattattcctaattaagaaaatggctgaacacgatgtttatggagttagcaatttcaaaatagggatgtttaacctgacatttattaagtcgttggatcataccgttttcccctctctgttagatgaggatagcaaaataaagttttttaaggggaaaaagctcaatattgtagcattacgatctctggaggattgtataaattacgtgactaaatccgagaatatgatagaaatgatgaaggaaagatcgactattttaaatagcatagatatagaaacggaatcggtagatcgtctaaaagaattgcttctaaaatgaaaaaaaacactgattcagaaatggatcaacgactcggatataagtttttggtgcctgatcctaaagccggagttttttatagaccgttacatttccaatatgtatcgtattctaattttatattgcatcgattgcatgaaatcttgaccgtcaagcggccactcttatcgtttaagaataatacagaacgaattatgatagaaattagcaatgttaaagtgactcctccagattactcacctataatcgcgagtattaaaggtaagagttatgacgcattagccacgttcactgtaaatatctttaaagaggtaatgaccaaagagggtatatccatcactaaaataagtagttatgagggaaaagattctcatttgataaaaattccgctactaataggatacgggaataaaaatccacttgatacagccaagtatcttgttcctaatgtcataggtggagtctttatcaataaacaatctgtcgaaaaagtaggaattaatctagtagaaaagattacaacatggccaaaatttagggttgttaagccaaactcattcactttctcgttttcctccgtatcccctcctaatgtattaccgacaagatatcgccattacaagatatctctggatatatcacaattggaagcgtcgaatatatcatcgacaaagacatttataacggtcaatattgttttgctgtctcaatatttatctagagtgagtctagaattcattagacgtagcttatcatacgatatgcctccagaagttgtctatctagtaaacgcgataatagatagtgctaaacgaattactgaatctattactgactttaatattgatacatacattaatgacctggtggaagctgaacacattaaacaaaaatctcagttaacgatcaacgagttcaaatatgaaatgctgcataactttttacctcatatgaactatacacccgatcaactaaagggattttatatgatatctttactaagaaagtttctctactgtatctaccacacttctagatatccagatagagattcgatggtttgtcatcgtatactaacatacggcaaatattttgagacgttggcacatgatgaattagagaattacataggcaacatccgaaacgatatcatgaacaatcacaagaacagaggcacttacgcggtaaacattcatgtactaacaactcctggacttaatcatgcattttctagtctattgagtggaaagttcaaaaagtcagacggtagttatcgaacacatcctcactattcatggatgcagaatatttctattcctaggagtgttggattttatccggatcaagtaaagatttcaaagatgttttctgtcagaaaataccatccaagtcaatatctttacttttgttcatcagacgttccggaaagaggtcctcaggtaggtttagtatctcaattgtctgtcttgagttccattacaaatatactaacgtctgagtatttggatttggaaaagaaaatttgtgagtatatcagatcatattataaagatgatataagttactttgaaacaggatttccaatcactatagaaaatgctctagtcgcatctcttaatccaaatatgatatgtgattttgtaactgactttagacgtagaaaacggatgggattcttcggtaacttggaggtaggtattactttagttagggatcacatgaatgaaattcgcattaatattggagcgggaagattagtcagaccattcttggttgtggataacggagagctcatgatggatgtgtgtccggagttagaaagcagattagacgacatgacattctctgacattcagaaagagtttccgcatgtcatcgaaatggtagatatagaacaatttacttttagtaacgtatgtgaatcggttcaaaaatttagaatgatgtcaaaggatgaaagaaagcaatacgatttatgtgactttcctgccgaatttagagatggatatgtggcatcttcattagtgggaatcaatcacaattctggacccagagctattcttggatgtgctcaagctaaacaagctatctcttgtctgagctcggatatacgaaataaaatagacaatggaattcatttgatgtatccagagaggccaatcgtgattagtaaggctttagaaacttcaaagattgcggctaattgcttcggccaacatgttactatagcattaatgtcgtacaaaggtatcaatcaagaggatggaattatcatcaaaaaacaatttattcagagaggcggtctcgatattgttacagccaagaaacatcaagtagaaattccattggaaaactttaataacaaagaaagagataggtctaacgcctattcaaaattagaaagtaatggattagttagactgaatgctttcttggaatccggagacgctatggcacgaaatatctcatcaagaactcttgaagatgattttgctagagataatcagattagcttcgatgtttccgagaaatataccgatatgtacaaatctcgcgttgaacgagtacaagtagaacttactgacaaagttaaggtacgagtattaaccatgaaagaaagaagacccattctaggagacaaatttaccactagaacgagtcaaaagggaacagtcgcgtatgtcgcggatgaaacggaacttccatacgacgaaaatggtatcacaccagatgtcattattaattctacatccatcttctctagaaaaactatatctatgttgatagaggttattttaacagccgcatattctgctaagccgtacaacaataagggagaaaaccgacctgtctgttttcctagtagtaacgaaacatccatcgatacatatatgcaattcgctaaacaatgttatgagcattcaaatccgaaattgtctgatgaagaattatcggataaaatcttttgtgaaaagattctctatgatcctgaaacggataagccttatgcatccaaagtattttttggaccaatttattacttgcgtctgagacatttaactcaggacaaggcaaccgttagatgtagaggtaaaaagacgaagctcattagacaggcgaatgagggacgaaaacgtggaggaggtatcaagttcggagaaatggagagagactgtttaatagcgcatggtgcagccaatactattacagaagttttgaaagattcggaagaagattatcaagatgtgtatgtttgtgaaaattgtggagacatagcagcacaaatcaagggtattaatacatgtcttagatgttcaaaacttaatctctctcctctcttaacaaaaattgataccacacacgtatctaaagtatttcttactcaaatgaacgccagaggcgtaaaagtcaaattagatttcgaacgaagacctccttcgttttataaaccattagataaagttgatctcaaaccgtcttttctggtctaatattgtttagtagatacttatcaacatcatcaagattatcaagattatcaagattatcaagataagctaattcactaaacacattatcgatttcggtatcgttactcgcagaataaagttcgttatgatcctgatattcggaaatctgtggagtttcaggttttggtggatgtgtaacagctacttgagataccgaagtctgatattcagaaagctgtggatgttctggttcggcatccaccgatggtgttacaccactactaattggttcagtaacgtctgtggacgatggaggcaccacttctacaggttctggttctttatcctcagtcatcaacggagctacttcaatgcgaggaaatgtataatttggtaatggtttctcatgtggatctgaagaagaggtaagatatctactagaaagataccgatcacgttctagttctcttttgtagaacttaactttttctttctcagcatctagttgatattccaacctcttcacgttactacgttcagatttcaattcacgttcgcatgggttacctccgcagtttttacgagcgatttcacgttcagccttcatgcgtctctccctctctctatcgagtttatcagagcagtctttctgaaggcgatcgaactccataaatttctccaacgctttgattgtttccatagatttccgaagttcagcttttaggactgtgattctttttctttcgaattcacagctggatgtacaaccgtttccattaccgccatctctaagtttcttttctagatcggcaacatttcatccccatgccttttacattcctcgagtctactgtcgtcgaaatatcgttccagctccttttcgacatcaataactttagcacgttgtctctcaagctctcttttgtagttatctgattccctggcacgtttaagatcttcatgcaattgagtcagctcttaacacaatctcttgcttcttcgtcatagtacgcgcaatcactgtgagatccattgttaccacgtctacactcggcgagctcgcgtttaagagattcaatttcccgtttgtattggtccatgtttccattgctaccaccattagatttacaggctgctagttgtcgttcgagatcagaaatacgggttttcttggaattgatttcgtcgatgtacttggcatcgaaacacttattaagttctttttccaattctacgattttatttctttcgcgagtcaattccctcctgtagtaactatctgttttgtcagattcacgctctctacgtagactttcttgcaagttactaatttgttccctagcacgtccgagtttagttttatatgctgaatagagttctgattcatcctttgagcagatctctagcgatcgtttaagattcctgattctagtctttagcctatttacctcctcagaagatgttccgttaccgttgcgtttacactcgttaagctgtctatcaagatccatgattctatctctaagacgttgcatctctctttccatatcagcattgctttcattattacgtctgcagtcactcaactgtctttcaatatctgagattctatctctaagacgtcgcatctctctctgtttcggcattggtttcattattacgtctacagtcgttcaactgtctttcaagatctgatattctagattggagtctgctaatctctgtagcattttcacggcattcactcagttgtctttcaagatctgaaattttagattggagtctgctaatctctgtaagatttcctcctccgctctcgatgcagtcggtcaacttattctctagttctctaatacgcgaacgcagtgcatcaacttcttgcgtgtcttcctggttgcgtgtacattcatcgagtctagattcgagatctctaacgcgtcgtcgttcttcctcaagttctctgcgtactacagaaagcgtgtccctatcttgttgatatttagcaatttctgattctagagtactgattttgcttacgtagttactaatatttgtcttggccttatcaagatcctccttgtatttgtcgcattccttgatatccctacgaagtctggacagttcccattcgacattacgacgtttatcgatttcagctcggagatcgtcatcgcgttgttttagccacatacgactgagttcaagttctcgttgacaagatccatctacttttccattcctaatagtatccagttccttttctagttctgaacgcatttctcgttccctatcaagcgattctctcaattctcggatagtcttcttatcaatttctaataaatctgaaccatcatctgtcccattttgaatatccctgtgttctttgatctcttttgtaagtcggtcgattctttcggttttataaacagaatccctttccaaagtcctaatcttactgagtttatcactaagttctgcattcaattcggtgagttttctcttggcttcttccaactctgttttaaactctccactatttccgcattcttcctcgcatttatctaaccattcaattagtttattaataactagttggtaatcagcgattcctatagccgttcttgtaattgtgggaacataattaggatcttctaatggattgtatggcttgatagcatcatctttatcattattagggggatggacaaccttaattggttggtcctcatctcctccagtagcgtgtggttcttcaatagccgtgttagtaataggcttaggcaaatgcttgtcgtacgcgggcacttcctcatccatcaagtatttataatcgggttctacgtctgaatattcttttctaagagacgcaacttctggagttagtagaagaactctgtttctatatctatcaacgctggaatcaatactcaagttaaggatagcgaatacctcatcgtcatcatccgtatcctctgaaacgccatcatatgacatttcatgaagtctaacgtattgataaacagaatcagatttagtattaaacagatccttaacctttttagtaaatgcatatgtatattttagatctccagatttcataatatggtcgcatgccttaaatgtcagtgcttccataatatagtctggaacactaattggtgatgaaaaagataccggaccatatgctacgttgataaataactctgagccactaactagataatgattaatgttaaggaagaggaaatattcagtgtataggtatgtcttggcgtcatatcttgtactaaacacgctaaacagtttgttaatgtgatcaatttccaatagattaattagagcagcaggaataccaacaaacatattaccacatccgtattttctatgaatatcacatatcatgttaaaaaatcttgatagaagagcgaatatctcgtctgacttaatgagtcgtagttcagcagcaacataagtcataactgtaaatagaacatactttcctgtagtgttgattctagactccacatcaacaccattattaaaaatagttttatatacatctttaatctgctctccgttaatcgtcgaacgttctagtatacggaaacactttgatttcttatctgtagttaatgacttagtgatatcacgaagaatattacgaattacatttcttgtttttcttgagagacctgattcagaactcaactcatcgttccatagtttttttacctcagtggcgaaatctttggagtgcttggtacatttttcaataaggttcgtgacctccatttattataaaaaaattttattcaaaacttaactacaatcgggtaattataaaatcgtagatctcccatgtggtggaatactaccatctatcgcatgtggatggacagtaggtaatggccatgggaacagtaatgtttgcatatttatctttcttgccagtattactgcatattgtcccaatgtttcgatgtgatgttctaacctatcaactgccgctgtatcacaacaatagtgtccgatgaaattaagattatgatccaatgtgtttaatatatgattatcaagtcttatacgatccgcgtcttttttgacaggatcaggttcttctacaggaagaagtttcggcctcttatgatattcatgtctgggaaacggtggtctagggtgaggctccggtatcggagtgggttttggattataatcatcatcgtctatgacatcatcttcgacttcgatatttattttgctatcttgatgatgtcctgtatcagttgcattttcagcactcgactgaatattagcgcattcattgtttattattaccatatttctaaacccaaaatgtatatgttgaacatcagtactatcgttgatgagtcttatagcatgaattcgcttatcgttatcgggtttagcttctgtcaccttagcaattccttttttattaaactctacataatcatatccatttctattgtttgttctaatataaacgagtatagcatcattgctaaatttttcaatagtatcgaaaacagaatatcctaaaccatataatatatattcaggaacactcaaactaaatgtccaggattctcctaaatacgtaaactttaatagtgcgaaatcattcaaaaatctaccacttatagatagatagtacataaatgcgtatagtagtctacctatctctttattatgaaaaccggcattacgatcatatatgtcgtgatatacctgtgatccgtttacgttaaaccataaatacatgggtgatcctataaacatgaatttatttctaattctcagagctatagttaattgaccgtgtaatatttgcttacatgcatacttgatacgctcattaataagatttttatcattgctcgttatctcagaatcgtatatataaggagtaccatcgtgattcttaccagatattatacaaaatactatatataaaatatattgaccaacgttagtaatcatataaatgtttaacgttttaaattttgtattcaatgatccattatcatacgctagcatggtcttatgatattcattctttaaaatataatattgtgttagccattgcattggggctcctaatggagattttttattctcatccattttaggataggctttcataaagtccctaataacttcgtgaataatgtttctatgttttctactgatgcatgtatttgcttcgatttttttatcccatgtttcatctatcatagatttaaacgcagtaatgctcgcaacattaacatcttgaaccgttggtacaattccgttccataaatttataatgttcgccatttatataactcattttttgaatatacttttaattaacaaaagagttaagttactcatatggacgccgtccagtctgaacatcaatctttttagccagagatatcatagccgctcttagagtttcagcgtgattttccaacctaaatagaacttcatcgttgcgtttacaacacttttctatttgttcaaactttgttgttacattagtaatctttttttccaaattagttagccgttgtttgagagtttcctcattgtcgtcttcatcggctttaacaattgcttcgcgtttagcctctggctttttagcagcctttgtagaaaaaaattcagttgctggaattgcaagatcgtcatctccggggaaaagagttccgtccatttaaagtacagattttagaaactgacactctgcgttatttatatttggtacaacacatggattataaatattgatgttaataacatcagaaaatgtaaagtctatacattgttgcatcgtgttaaattttctaatggatctagtattattgggtccaacttctgcctgaaatccaaatatggaagcggatacaaaaccgtttcctggataaaccacacatctccacttttgctttacatcagaaattgtgtcattgacatcttgaactctcctatctaatgccggtgttccacctatagattttgaatattcgaatgctgcatgagtagcattaaattccttaatattgccataattttcatatattgagtaaccctggataaaaagtaaacacaccgcagccgtcgctaccacaataaaaaaaattgatagagagttcatttataatctattagaagctgacaaaatttttttacacgcatcagacaatgctttaataaatagttcaacatctacttttgtcatatcgaaccgatggtatgattctaacctagaattacatccgaaaaagttgactatgttcatagtcattaagtcattaacaaacaacattccagactctggattataagacgatactgtttcgtcacaattacctaccttaatcatgtgattatgaatattggctattagagcaccttctaagaaatctataatatctttgaaacacgatttaaaatcaaaccacgaatatacttctacgaagaaagttagtttacccataggagaaataactataaatggagatctaaatacaaaatccggatctatgatagttttaacattattatattctctattaaatacctccacatctaaaaatgttaattttgaaactatgtcttcgtttattaccgtacctgaactaaacgctataagctctattgtttgagaactctttaaacgatattcttgaaatacatgtaacaaagtttcctttaactcggtcggtttatctaccatagttacagaatttgtatccttatctataatataataatcaaaatcgtataaagttatataattatcgcgttcagattgtgatcttttcaaatagactaaaaaccccatttctctagtaagtatcttatgtatatgtttgtaaaatatcttcatggtgggaatatgctctaccgcagttagccattcctcattgacagcggtagatgtattagacaaaactattccaatgtttaacaagggccattttacgagattattaaatccttgtttgataaatgtagccaatgagggttcgagttcaacgacgattgaattctcttcccgcggatgctgcatgatgaacgacgggatgttgttcgattgatttggaattctttttcgactttttgtttatattaaatattttaaaatttatagctgatagcaattcatgtactacggataatgtagacgcgtattgcgcatcgatatctttattattagataaatttatcaataaatgtgagaagtttgcctcgttaaggtcttccatttaaatattatataaacatttgtgtttgtatcttattcgtcttttatggaatagttttttactagtaaagctgcaattacacactttgtccgtaaaacataaatataaacaccagcttttatcaatcgttccaaaaagtcgacggcggacatttttaacatggcatctattttaaatacacttaggtttttggaaaaaacatcattttataattgtaacgattcaataactaaagaaaagattaagattaaacataagggaatgtcatttgtattttataagccaaagcattctaccgttgttaaatacttgtctggaggaggtatatatcatgatgatttggttgtattggggaaggtaacaattaatgatctaaagatgatgctattttacatggatttatcatatcatggagtgacaagtagtggagcaatttacaaattgggatcgtctatcgatagactttctctaaataggactattgttacaaaagttaataattatgatgatacattttttgacgacgatgattgatcgctattgcacaattttgtttttttactttctaatatagcgtttagattctttttcatgtgcgaatattgatttactaaaatatcgatgtttaacttttgttctatgacgtccttatcagcggtatcggtacatatacgtaattcaccttcacaaaatacggagtcttcgataataatagccaatcgattattggatctagcggtctgtatcatattcaacatgtttaatatatcctttcgtttcccctttacaggcatcgatcgtagcatattttccgcgtctgagatggaaatgttaaaactacaaaaatgcgtaatgttagcccgtcctaatattggtacgtgtctataagtttggcatagtagaataatagacgtgtttaaatgccttccaaagtttaagaattctattagagtattgcattttgatagtttatcgcctacatcatcaaaaataagtaaaaagtgtgctgattttttatgattttgtgcgacagcaatacatttttctatgttacttttagttcgtatcagattatattctagagattcctgactactaacgaaattaatatgatttggccaaatgtatccatcataatctggattataaacgggtgtaaacaagaatatatgtttatattttttaactagtgtagaaaacagagatagtaaatagatagtttttccagatccagatcctcccgttaaaaccattctaaacggcatttttaataaattttctcttgaaaattgtttttcttggaaacaattcataattatatttacagttactaaattaatttgataataaatcaaaatatggaaaactaaggtcgttagtagggaggagaacaaagaaggcatatcgtgatataaataacatttattatcatgatgacaccagaaaacgacgaagagcagacatctgtgttctccgctactgtttacggagacaaaattcagggaaagaataaacgcaaacgcgtgattggtctatgtattagaatatctatggttatttcactactatctatgattaccatgtccgcgtttctcatagtgcgcctaaatcaatgcatgtctgctaacgaggctgctattactgacgccgctgttgccgttgctgctgcatcatctactcatagaaaggttgcgtctagcactacgcaatatgatcacaaagaaagctgtaatggtttatattaccagggttcttgttatatattacattcagactaccagttattctcggatgctaaagcaaattgcactgcggaatcatcaacactacccaataaatccgatgtcttgattacctggctcattgattatgttgaggatacatggggatctgatggtaatccaattacaaaaactacatccgattatcaagattctgatatatcacaagaagttagaaagtatttttgtgttaaaacaatgaactaatatttatttttgtacattaataaatgaaatcgcttaatagacaaactgtaagtaggtttaagaagttgtcggtgccggccgctataatgatgatactctcaaccattattagtggcataggaacatttctgcattacaaagaagaactgatgcctagtgcttgcgccaatggatggatacaatacgataaacattgttatctagataccaacattaaaatgtctacagataatgcggtttatcagtgtcgtaaattacgagctagattgcctagacctgatactagacatctgagagtattgtttagtattttttataaagattattgggtaagtttaaaaaagaccaataataaatggttagatattaataatgataaagatatagatattagtaaattaacaaattttaaacaactaaacagtacgacggatgctgaagcgtgttatatatacaagtctggaaaactggttgaaacagtatgtaaaagtactcaatctgtactatgtgttaaaaaattctacaagtgacaacaaaaactgcagaaaaattgaaaaactagcgtctttttttgctcgactcgagaccatggaggaatccgtggttcggccatctgtatttgtagttgacggccaaacggacattccattcactcgcttgggacgatcacacaggcgacagagttgttcagtcgccagggtgggattgggcttgctgctgctgctcatgggcgccggcttggccgttcaaggttggtttcttcttcagcttcactggcgcttgggggagatggttacgcggttgcccgacgggccagctgggtcttgggaacaactgatccaggagaggagatcacatgaggtcaaccccgcagcgcacttgactggagccaattcttccctcacgggctcaggcggccccctgctctgggagacacagctgggactcgcttttctgcgaggactgtcttatcacgatggagcgctggtggtaaccaagacggggtactactatatctatagtaaggtacagcttggcggggtcggatgcccgctcgggttggcgggaacaatcacccacggtctgtacaagagaacacctcggtacccggaggaacttgaacttctggtgagccagcagagcccgtgtggtagagcaacatccagttccagagtatggtgggattcatcctttctcgggggtgtggtacatctggaggctggcgaaaaagtggtcgtgagagtgcttggaaagaggctcgtacgattgagagatggaactagatcatactttggggcgtttatggtgtgattaattaatttttatgagctcagacggcaatggatggatcataattgatgggaaatgcaatagtaattttttatcataaaagttgtaaagtaaataataaaacaataaatattgaactagtagtacgtatattgagcaatcagaaatgatgctggtacctcttatcacggtgaccgtagttgcgggaacaatattagtatgttatatattatatatttgtaggaaaaagatacgtactgtctataatgacaataaaattatcatgacaaaattaaaaaagataaagagttctaattccagcaaatctagtaaatcaactgatagcgaatcagactgggaggatcactgtagtgctatggaacaaaacaatgacgtagataatatttctaggaatgagatattggacgatgatagcttcgctggtagtttaatatgggataacgaatccaatgttatggcgcctagcacagaacacatttacgatagtgttgctggaagcacgctgctaataaataatgatcgtaatgaacagactatttatcagaacactacagtagtaattaatgaaacggagactgttaaagtacttaatgaagataccaaacagaatcctaactattcatccaatcctttcgtaaattataataaaaccagtatttgtagcaagtcaaatccgtttattacagaacttaacaataaatttagtgagaataatccgtttagacgagcacatagcgatgattatcttaataagcaagaacaagatcatgaacacgatgatatagaatcatcggtcgtatcattggtgtgattagtttcctttttataaaattgaagtaatatttagtattattgctgccgtcacgttgtacaaatggagatattccctgtattcggcatttctaaaattagcaattttattgctaataatgactgtagatattatatagatacagaacatcaaaaaattatatctgatgagatcaatagacagatggatgaaacggtacttcttaccaacatcttaagcgtagaagttgtaaatgacaatgagatgtaccatcttattcctcatagattatcgacgattatactctgtattagttctgtcggaggatgtgttatctctatagataatgacgtcaatggcaaaaatattctaacctttcccattgatcatgctgtaatcatatccccactgagtaaatgtgtcgtagttagcaagggccctacaaccatactggttgctaaagcggatatacccagcaaacgattggtaacatcgtttacaaacgacatactgtatgtaaacaatctatcactgattaattatttgccgttgtctgtattcattattagacgagtcaccgactatttggatagacacatatgcgatcagatatttgctaataataagtggtattcccttataaccatcgacgataagcaatatcctattccatcaaattgtataggtatgtcttctgccaagtacataaattctagcatcgagcaagatactttaatacatgtttgtaacctcgagcatccattcgacttagtatacaaaaaaatgcagtcgtacaattctgtacctatcaaggaacaaatattgtacggtagaattgataatataaatatgagcattagtatttctgtggattaatagatttctagtatggggatcattaatcatctctaatctctaaatacctcataaaacgaaaaaaaagctattatcaaatactgtacggaatagattcattctcttctctttttatgaaactctgttgtatatctactgataaaactggaagcaaaaaatctgataaaaagaataagatcaagatcaaggattatatggaacacgattattataaaataacaatagttcctggttcctcttccacgtctactagctcgtggtattatacacatgcctagtaatagtctctttgcgttgatggaaagcagactagaaataacaggctaaaatgttcagacaccataatagttcccaacccagataataacagagtaccatcaacacattcctttaaactcaatcccaaacccaaaaccgttaaaatgtatccggccaattgatagtagataatgaggtgtacagcgcatgataatttacacagtaaccaaaatgaaaatactttagtaattataagaaatatagatggtaacgtcatcatcaacaatccaataatatgccggagagtaaacattgacggataaaacaaaaatgctccgcataactctatcatggcaataacacaaccaaatacttgtaagattcctaaattagtagaaaatacaacggatatcgatgtataagtgatctcgagaaataataagaataaagtaatgcccgtaaagataaacatcaacattgtttggtaatcattaaaccaattagtatgacgttgaactaatttcacagtaaattttattccagtattatccccgcatgtataagtacctggtaagatatctttatattccataatcaatgagacatcactatctgataacgaatgaagtctagcactagtatgccatttacttaatattgtcgtcttggaagttttattataagttaaaatatcatggttatccaatttccatctaatatactttgtcggattatctatagtacacggaataatgatggtatcattacatgctgtatactctatggtctttgtagttgttataacaaccaacgtatagaggtatatcaacgatattctaactcttgacattttttatttatttaaaatgatacctttgttatttattttattctattttgctaacggtattgaatggcataagtttgaaacgagtgaagaaataatttctacttacttattagacgacgtattatacacgggtgttaatggggcggtatacacattttcaaataataaactaaacaaaactggtttaactaataataattatataacaacatctataaaagtagaggatgcggataaggatacattagtatgcggaaccaataacggaaatcccaaatgttggaaaatagacggttcagacgacccaaaacatagaggtagaggatacgctccttatcaaaatagcaaagtaacgataatcagtcacaacggatgtgtactatctgacataaacatatcaaaagaaggaattaaacgatggagaagatttgacggaccatgtggttatgatttattcacggcggataacgtaattccaaaagatggtttacgaggagcattcgtcgataaagacggtacttatgacaaagtttacattcttttcactgatactatcggctcaaagagaattgttaaaattccgtatatagcacaaatgtgcctaaacgacgaaggtggtccatcatcgttgtctagtcatagatggtcgacgtttctcaaagtcgaattagaatgtgatatcgacggaagaagttatagataaattattcattctaaaactataaaaacagataatgatacgatactatatgtattcttcgatagtccgcattatgtacctattctatgaataccattaaacaatctttttctacgtcaaaattggaaggatatacaaagcaattgccgtctccagctcctggtatatgtctaccagctggaaaagttgttccacataccacgtttgaagtcatagaaaaatataatgtactagatgatattataaagcctttatctaaccaacctatcttcgaaggaccgtctggtgttaaatggttcgatataaaggagaaggaaaatgaacatcgggaatatagaatatacttcataaaagaaaattctatatattcgttcgatacaaaatctaaacaaactcgtagctcgcaagtcgatgcgcgactattttcagtaatggtaacttcgaaaccgttatttatagcagatatagggataggagtaggaatgccacaaatgaaaaaaatacttaaaatgtaatcttaatcgagtacaccacacgacaatgaacaaacataagacagattatgctggttatgcttgctgcgtaatatgcggtctaattgttggaattatttttacagcgacactattaaaagttgtagaacgtaaattagttcatacaccatcaatagataaaacgataaaagatgcatatattagagaagattgtcctactgactggataagctataataataaatgtatccatttatctactgatcgaaaaaacctgggaggaaggacgtaatgcatgcaaagctctaaatccaaattcggatctaattaagatagagactccaaacgagttaagttttttaagaagccttagacgaggctattgggtaggagaatccgaaatattaaaccagacaaccccatataattttatagctaaaaatgccacgaagaatggaactaaaaaacggaaatatatttgtagtacaacgaatactcccaaactgcattcgtgttacactatataacaattacactacatttttatcataacactacttcggttagatgttttagaaaaaaataaatatcgccgtaccgttcttgtttttataaaaataacaattaacaattatcaaattttttctttaatattttacgtggttgaccattcttggtggtaaaataatctcttagtgttggaatggaatgctgtttaatgtttccgcactcatcgtatattttgacgtatgcagtcacatcgtttacgcaatagtcagactgtagttctatcatgcttcctacatcagaaggaggaacagttttaaagtctcttggttttaatctattgccattagttttcatgaaatcctttgttttatccacttcacattttaaataaatgtccactatacattcttctgttaattttactagatcgtcatgggtcatagaatttataggttccgtagtccatggatccaaactagcaaacttcgcgtatacggtatcgcgattagtgtatacaccaactgtatgaaaattaagaaaacagtttaataaatcaacagaaatatttaatcctccgtttgatacagatgcgccatatttatggatttcggattcacacgttgtttgtctgaggtgttcgtctagtgttgcttctacgtaaacttcgattcccatatattctttattgtcagaatcgcataccgatttatcatcatacactgtttgaaaactaaatggtatacacatcaaaataataaataataacgagtacattctgcaatattgttatcgtaattggaaaattagtgttcgagtgagtcggattatgtgagtactggattgtatattttattttatattttgtaataagaataaaatgctaatgtcaagtttattccaatagatgtcttattaaaaaacatatataataaataacaatggctgaatggcataaaattatcgaggatatctcaaaaaataataagttcgaggatgccgccatcgttgattacaagactacaaagaatgttctagctgctattcctaacagaacatttgccaagattaatccgggtgaaattattcctctcatcactaatcgtaatattctaaaacctcttattggtcagaaatattgtattgtatatactaactctctaatggatgagaacacgtatgctatggagttgcttactgggtacgcccctgtatctccgatcgttatagcgagaactcataccgcacttatatttttgatgggtaagccaacaacatccagacgtgatgtgtatagaacgtgtagagatcacgctacccgtgtacgcgcaactggtaattaaaataaaaagtaatattcatatgtagtgtcaattttaaatgatgatgatgaaatggataatatccatattgacgatgtcaataatgccggtattggcatacagctcatcgatttttagatttcattcagaggatgtggaattatgttatgggcatttgtattttgataggatctataatgtagtaaatataaaatataatccgcatattccatatagatataattttattaatcgcacgttaaccgtagatgaactagacgataatgtcttttttacacatggttattttttaaaacacaaatatggttcacttaatcctagtttgattgtctcattatcaggaaacttaaaatataatgatatacaatgctcagtaaatgtatcgtgtctcattaaaaatttggcaacgagtacatctactatattaacatctaaacataagacttattctctacatcggtccacgtgtattactataataggatacgattctattatatggtataaagatataaatgacaagtataatgacatctatgattttactgcaatatgtatgctaatagcgtctacattgatagtgaccatatacgtgtttaaaaaaataaaaatgaactcttaattatgctatgctattagaaatggataaaatcaaaattacggttgattcaaaaattggtaatgttgttaccatatcgtataacttggaaaagataactattgatgttacacctaaaaagaaaaaagaaaaggatgtattattagcgcaatcagttgctgtcgaagaggcaaaagatgtcaaggtagaagaaaaaaatattatcgatattgaagatgacgatgatatggatgtagaaagcgcataatacgatctataaaaataagtatataataaatactttttatttacggtactcttgtagtggtgataccctactcaattatttttttaaaaaaatacttattctgattcttctagccatttccgtgttcgttcgaatgccacatcgacgttaaagataggggagtagttgaaatctagttctgcattgttggtacgcacctcaaatgtagtgttggatatcttcaacgtatagttgttgagtagtgatggttttctaaatagaattctcttcatatcattcttgcacgcgtacatttttagcatccatcttggaattctagatccttgttctattcccaatggtttcatcaatagaagattaaacatatcgtacgaacacgatggagagtaatcgtagcaaaagtaagcatttcctttaatcttagatcccggatactggatatattttgcagccaacacgtgcatccatgcagcatttcctacatatacccggctatgcaccgcgtcatcatcgactgtacgatacataatgttaccgtgttgcttacattgctcgtaaaagactttcgtcaatttgtctccttctccgtaaattccagtgggtcttaggcaacaagtatacaattttgctccattcatgattacggaattattggctttcataaccagttgctcggccatacgtttactttttgcgtatacatgtcctggtgatatatcataaagggtatgctcatggccgatgaatggatcaccgtgtttattgggtcctattgcttccatgctactagtatagatcaaatacttgattcctaggtccacacaagctgccaatatagtctgtgttccataatagtttactttcatgatttcattatcggtgtattttccaaatacatccactagagcagccgtatgaataatcagatttaccccatctagcgcttctctcaccttatcaaagtcgtttatatcacattgtatatagtttataaccttaactttcgaggttattggttgtggatcttctacaatatctatgactctgatttcttgaacatcatctgcactaattaacagttttactatatacctgcctagaaatccggcaccaccagtaaccgcgtacacggccattgctgccactcataatatcagactacttattctattttactaaataatggctgtttgtataatagaccacgataatatcagaggagttatttactttgaaccagtccatggaaaagataaagttttaggatcagttattggattaaaatccggaacgtatagtttgataattcatcgttacggagatattagtcaaggatgtgattccataggcagtccagaaatatttatcggtaacatctttgtaaacagatatggtgtagcatatgtttatttagatacagatgtaaatatatttacaattattggaaaggcgttatctatttcaaaaaatgatcagagattagcgtgtggagttattggtatttcttacataaatgaaaagataatacattttcttacaattaacgagaatggcgtttgatatatcagttaatgcgtctaaaacaataaatgcattagtttacttttctactcagcaaaataaattagtcatacgtaatgaagttaatgatacacactacactgtcgaatttgatagggacaaagtagttgacacgtttatttcatataatagacataatgacaccatagagataagaggggtgcttccagaggaaactaatattggttgcgcggttaatacgccggttagtatgacttacttgtataataagtatagttttaaactgattttagcagaatatataagacacagaaatactatatccggcaatatttattcggcattgatgacactagatgatttggctattaaacagtatggagacattgatctattatttaatgagaaacttaaagtagactccgattcgggactatttgactttgtcaactttgtaaaggatatgatatgttgtgattctagaatagtagtagctctatctagtctagtatctaaacattgggaattgacaaataaaaagtataggtgtatggcattagccgaacatatatctgatagtattccaatatctgagctatctagactacgatacaatctatgtaagtatctacgcggacacactgagagcatagaggatgaatttgattattttgaagacgatgattcgtctacatgttctgccgtaaccgacagggaaacggatgtataattttttttatagcgtgaaggatatgataaaaaatataattgttgtatttatcccattccaatcaccttatatgattctgtaaaaaaattatactgtaacacaataaaggagtcttatagatgtatagaggtcagatactggtttgataaactgtttattccacataagtatgtttgactttatggttagacccgcatactttaacaaatcactgaaaattggagttaggtattgacctctcagaatcagttgccgttctggaacattaaatgtattttttatgatatactccaacgcatttatgtgggcatacaacaagtcattactaatggagtattccaagagttttagttgtctagtatttaacaagagaagagatttcaacagactgtttatgaactcgaacgccgcctcattgtcgcttatattgatgatgtcgaattctcccaatatcatcactgatgagtagctcatcttgttatcgggatccaagttttctaaagatgtcattaaaccctcgatcatgaatggatttatcatcatcgtttttatgttggacatgagcttagtccgtttgtccacatctatagacgacgatttctgaattatttcatatatccctctctttaactccaggaacttgtcaggatggtctactttaatatgttctcgtctaagagatgaaaatctttggatggttgcacgcgacttttctttaaaggatgacgttgcccaagatcctctcttaaatgaatccatcttatccttggacaagatggacagtctattttccttagatggtttaatatttttgttacccatgatctataaaggtagacctaatcgtctcggatgaccatatatttattttcagttttattatacgcataaattgtaaaaaatatgttaggtttacaaaaatgtctcgtggggcattaatcgtttttgaaggattggacaaatctggaaaaacaacacaatgtatgaacatcatggaatctataccggcaaacacgataaaatatcttaactttcctcagagatccactgtcactggaaagatgatagatgactatctaactcgtaaaaaaacctataatgatcatatagttaatctattattttgtgcaaatagatgggagtttgcatcttttatacaagaacaactagaacagggaattactttaatagttgatagatacgcattttctggagtagcgtatgccgccgctaaaggcgcgtcaatgactctcagtaagagttatgaatctggattgcctaaacccgacttagttatattcttggaatctggtagcaaagaaattaatagaaacgtcggcgaggaaatttatgaagatgttacattccaacaaaaggtattacaagaatataaaaaaatgattgaagaaggagatattcattggcaaattatttcttctgaattcgaggaagatgtaaagaaggagttgattaagaatatagttatagaggctatacacacggttactggaccagtggggcaactgtggatgtaatagtgaaattacattttttataaatagatgttagtacagtgttataaatggatgaagcatattactctggcaacttggaatcagtactcggatacgtgtccgatatgcataccgaactcgcatcaatatctcaattagttattgccaagatagaaactatagataatgatatattaaacaaggacattgtaaattttatcatgtgtagatcaaacttggataatccatttatctctttcctagatactgtatatactattatagatcaagagatctatcagaccgaattgattaattcattagacgacaatgaaattatcgattgtatagttaacaagtttatgagcttttataaggataacctagaaaatatagtagatgctatcattactctaaaatatataatgaataatccagattttaaaactacgtatgccgaagtactcggttccagaatagccgatatagatattaaacaagtgatacgtaagaatatactacaattgtctaatgatatccgcgaacgatatttgtgaaaaatattaaaaaaaaatactttttttattaaatgacgtcgcttcgcgaatttagaaaattatgctgtgatatatatcacgcatcaggatataaagaaaaatctaaattaattagagactttataacagatagggatgataaatatttgatcattaagctattgcttcccggattagacgatagaatttataacatgaacgataaacaaattataaaattatatagtataatatttaaacaatctcaggaagatatgctacaagatttaggatacggatatataggagacactattaggactttcttcaaagagaacacagaaatccgtccacgagataaaagcattttaactttagaagaagtggatagttttttaactacgttatcatccgtaactaaagaatcgcatcaaataaaattattgactgatgtagcatctgtttgtacatgtaatgatttaaaatgtgtagtcatgcttattgataaagatctaaaaattaaagcgggccctcggtacgtacttaacgctattagtcctcatgcctatgatgtgtttagaaaatctaataacttgaaagagataatagaaaatgcatctaaacaaaatctagactctatatctatttctgttatgactccaattaatcccatgttagcggaatcgtgtgattctgtcaataaggcgtttaaaaaatttccatcaggaatgtttgcggaagtcaaatacgatggtgaaagagtacaagttcataaaaataataacgagtttgccttctttagtagaaacatgaaaccagtactctctcataaagtggattatctcaaagaatacataccgaaagcatttaaaaaagctacgtctatcgtattggattctgaaattgttcttgtagacgaacataatgtaccgctaccgtttggaagtttaggaatacacaaaaagaaagaatataaaaactctaacatgtgtttgttcgtgtttgactgtttgtactttgatggattcgatatgacggacattccattgtacgaacgaagatcttttctcaaagatgttatggttgaaatacccaatagaatagtattctcagagttgacgaatattagtaacgagtctcagttaactgacgtattggatgatgcactaacgagaaaattagaaggattggtcttaaaagatattaatggagtatacgaaccgggaaagagaagatggttaaaaataaagcgagactatttgaacgagggttccatggcagattctgccgatttagtagtactaggtgcctactatggtaaaggagcaaagggtggtatcatggcagtctttctaatgggttgttacgacgatgaatccggtaaatggaagacggttaccaagtgttcaggacacgatgataatacgttaagggagttgcaagaccaattaaagatgattaaaattaacaaggatcccaaaaaaattccagagtggttagtagttaataaaatctatattcccgattttgtagtagaggatccgaaacaatctcagatatgggaaatttcaggagcagagtttacatcttccaagtcccataccgcaaatggaatatccattagatttcctagatttactaggataagagaggataaaacgtggaaagaatctactcatctaaacgatttagtaaacttgactaaatcttaatagttacatacaaactgaaaattaaaataacaccatttagttggtggtcgccatggatggtgttattgtatactgtctaaacgcgttagtaaaacatggcgaggaaataaatcatataaaaaatgatttcatgattaaaccatgttgtgaaagagtttgtgaaaaagtcaagaacgttcacattggcggacaatctaaaaacaatacagtgattgcagatttgccatatatggataatgcggtatccgatgtatgcaattcactgtataaaaagaatgtatcaagaatatccagatttgctaatttgataaagatagatgacgatgacaagactcctactggtgtatataattattttaaacctaaagatgttattcctgttatcatatctataggaaaggataaagatgtctgtgaactattaatctcatcagacatatcgtgtgcatgcgtggagttaaattcatatcacgtagccattcttcccatgaatgtttccttttttaccaaaggaaatgcctcgttgattattctcctgtttgatttctctatcgatgcagcacctctcttaagaagtgtaaccgataataatgttattatatctagacaccagcgtctacatgacgagcttccgagttccaattggttcaagttttacataagtataaagtccgactattgttctatattatatatggttgttgatggatctgtgatgcatgcgatagctgataatagaactcacgcaattattagcaaaaatatattagacaatactacaattaacgatgagtgtagatgctgttattttgaaccacagattaggattcttgatagagatgagatgctcaatggatcatcgtgtgatatgaacagacattgtattatgatgaatttacctgatgtaggcgaatttggatctagtatgttggggaaatatgaacctgacatgattaagattgctctttcggtggctggtaatttaataagaaatcgagactacattcccgggagacgaggctatagctactacgtttacggtatagcctctagataatttttttaagcacgaaataaaaaacataattttaaaccaatctatttcatactattttgtgtgatcaccatggacataaagatagatattagtatttctggtgataaatttacggtgactactaggagggaaaatgaagaaagaaaaaaatatctacctctccaaaaagaaaaaactactgatgttatcaaacctgattatcttgagtacgatgacttgttagatagagatgagatgtttactattctagaggaatattttatgtacagaggtctattaggcctcagaataaaatatggacgactctttaacgaaattaaaaaattcgacaatgatgcggaagaacaattcggtactatagaagaactcaagcagaaacttagattaaattctgaagagggagcagataactttatagattatataaaggtacaaaaacaggatatcgtcaaacttactgtatacgattgcatatctatgataggattgtgtgcatgcgtggtagatgtttggagaaatgagaaactgttttctagatggaaatattgtttacgagcgattaaactgtttattaatgatcacatgcttgataagataaaatctatactgcagaatagactagtatatgtggaaatgtcatagaaagttaatgagagcaaaaatatataaggttgtattccatatttgttattttttctgtaatagttaaaaaaatacattcgatggtctatctatcagattattatgtgttataaggtactttttctcataataaactagagtatgagtaagatagtgtttttcaaaacatataaatctaaaattgatggatgagatatacagctattaatttcgaaaatatataaatctaaaattgatggataagatatacagctattaatttcgaaaatatattttaatctgataactttaaacatggatttttgatggtggtttaacgttttaaaaaaagattttgttattgtagtatatgataatattaaaagatggatataaagaatttgctgactgcatgtactattttttacattactacattggctacggcagatatacctactccgccaccaacgggtcatgtgacaagggagaatatcttgataagaggcataatcaatgttgtaatcggtgtccacctggagaatttgccaaggttagatgtaatggtaacgataacacaaaatgtgaacgctgcccacctcatacatataccacaatccccaattattctaatggatgtcatcaatgtagaaaatgcccaaccggatcatttgataaggtaaagtgtaccggaacacagaacagtaaatgttcgtgtcttcctggttggtattgcgctactgattcttcacagactgaagattgttgaaattgtgtaccaaaaaggagatgtccatgcggatactttggtggaatagatgaacaaggaaatcctatttgtaaatcgtgctgtattggtgaatattgcaactacctacgtaattatagacttgatccattttctccatgcaaactatctaaatgtaattaattatgattttgatgataatgttaccatacattatatcgctacttggttagtgtattattcagtatgaagacctattaataattacttatcttttgacgatcttgttataattataatataaaaacttatggcatagtaactcataattgctgacgcgataaattcgtaataatctgttttgttcaaatttttataaggaatctacaggcataaaaataaaaatataatttataatatactcttacagcgcgccatcatgaatagcagcagtaaattaattgctgttattaatggatttagaaatagtggacgattttgtgatattaatatagttattaatgatgaaaggataaacgctcacagactcatcctatctggagcctccgaatatttttccattctgttttccaataattttatcgattctaatgaatacgaagttaatctaagtcatttagattatcaaagtgttaacgatttgatcgattacatttatgggatacctttgagcctaactaacgataacgtgaaatatattctttcaaccgctgattttttacaaattggatctgccattactgagtgcgaaaaatacatacttaaaaatctttgttctagaaactgtatcgatttctacatatacgctgataaatataataacaagaaaatagaatcagcgtcgtttaacacaatattacgaaatattttgagactcatcaacgatgaaaactttaaatacttaacagaggaatcaatgataaaaattttaagcgatgatatgttaaatataaaaaatgaggattttgcaccactaattctcattaaatggttagagagtactcaacaatcatgcaccgtcgagttacttagatgcctcagaatatcattgctttccccacaagttataaaatcactttatagtcatcaactggttagttcaatctacgaatgtataacattcttaaacaatatagcattcttggatgaatcatttcctagataccatagcatcgagttgatatctatcggtataagtaattcgcatgataagatttccataaactgctacaatcataaaaaaaatacatgggaaatgatatcttcacgtagatataggtgtagtttcgcagtggccgtcctggataatattatctatatgatgggtggatatgatcagtccccgtatagaagttcaaaggttatagcgtacaatacatgtacaaattcttggatatatgatataccagagctaaaatatcctcgttctaattgtgggggactggctgatgacgaatacatttattgtataggcggcatacgcgatcaggattcatcgttgacatctagtattgatagatggaagccatcaaaaccatattggcagaagtatgctaaaatgcgcgaaccaaaatgtgatatgggggttgcgatgttaaacggattaatatatgtcatgggtggaatcgttaaaggtgacacgtgtaccgacgcactagagagtttatcagaagatggatggatgaagcatcaacgtcttccaataaaaatgtccaatatgtcgacgattgttcatgatggcaagatttatatatctggaggttacaacaatagtagtgtagttaatgtaatatcgaatctagtccttagctataatccgatatatgatgaatggaccaaattatcatcattaaacattcctagaattaatcccgctctatggtcagcgcataataaattatatgtaggaggaggaatatctgatgatgttcgaactaatacatctgaaacatacgataaagaaaaagattgttggacattggataatggtcacgtgttaccacgcaattatataatgtataaatgcgaaccgattaaacataaatatccattggaaaaaacacagtacacgaatgattttctaaagtatttggaaagttttataggtagttgatagaacaaaatacataattttgtaaaaataaatcactttttatactaatatgacacgattaccaatacttttgttactaatatcattagtatacgctacaccttttcctcagacatctaaaaaaataggtgatgatgcaactctatcatgtaatcgaaataatacaaatgactacgttgttatgagtgcttggtataaggtacctagtagaatttcattttgtttttttctatgctataaatactgcagaccatgtaccgaatgcagctcctctcttgcatagctctctctttggcacttgtgactaacagtgcaccgacgtcttccagtactaagaagacgcaattgcaactggagcacttgctgttggatcttcaaatgattctgaacggaattaacaactacaagaacccaaagcttacccggatgctcactgctaagttctatatgcctaaaaaagccaccgagctgaaacatcttcaatgcctcgaagaagctcttaaacctcttgaggaggttctgaacctggctcagagcaaaaactttcatttcgacccgcgagatgtggtcagcaacataaacgtgtttgtgcttgaactcaaggggagtgaaactacctttatgtgcgagtatgcagatgagactgccacaatcgttgaattccttaatcgatggatcacattctgccagagcattatttcaaccttgactggtgggggtggttctggtggcggtggatcaggagggggtggaagcaggggcgtattccgaagagacgctcataaaagcgaggtggcccaccgattcaaggacttgggagaagaaaatttcaaggccctcgtcctgattgcctttgcccagtaccttcaacaatgtccattcgaggaccacgttaagcttgtgaatgaagttactgaatttgcaaagacgtgcgtcgcggacgagtctgccgaaaactgcgataaaagcttgcacactctgttcggggataagctctgcacagtggcaacccttcgcgaaacatatggcgaaatggctgattgttgcgcaaaacaagagcccgagaggaatgagtgctttttgcaacacaaagatgataacccaaatctccctaggctggttcgccccgaagtggacgtaatgtgtacggcgtttcatgacaacgaggaaacctttctcaaaaagtatttgtacgagattgctagacgccatccttatttctatgctcccgagttgctgttttttgccaaaagatataaagcagcattcaccgagtgttgtcaggctgccgacaaggcagcatgtcttcttccgaaactggacgagctgagggacgaggggaaagccagtagtgcaaagcaacgattgaaatgtgcatcattgcagaagttcggtgaaagagcatttaaagcttgggcagtagctcggttgagccaacgatttcccaaggctgagtttgccgaagttagtaagctcgtcacggacctcacgaaagtccacacagagtgttgccatggcgacctcctcgagtgcgcagatgatcgagctgatcttgccaagtatatctgtgaaaatcaagattcaattagctctaaattgaaggaatgttgcgaaaaacccttgttggaaaagtcacattgtattgcggaggtcgaaaatgacgaaatgcccgccgatttgccttccctggctgcggattttgtcgagagcaaggatgtgtgtaagaactatgcagaggcaaaggatgtattcttggggatgttcctttacgaatacgccagacgccaccctgactacagcgtagtgctccttttgcgcttggccaaaacatatgaaacgaccctcgaaaaatgttgtgctgcggcagatccgcacgagtgttacgccaaggtattcgacgaatttaagccacttgttgaagagccgcagaatcttatcaagcagaattgcgaactttttgagcagctcggagagtataagttccagaatgcgttgctcgtgcgatacaccaaaaaagtgccgcaggtatccacccccaccctggtcgaagtatccagaaatctcgggaaagttggctccaagtgttgtaaacacccggaggcgaagagaatgccttgcgcagaagattacctttccgtcgtcctgaatcaactgtgcgtcctccatgagaaaacaccagtctcagatcgcgtgacgaagtgttgcacggagagcttggtcaacagacggccctgtttctcagcgctggaggtagatgaaacatatgtgccgaaggagtttaatgcggaaaccttcaccttccatgccgacatctgtactctgagcgagaaggagagacagataaagaaacaaacggctcttgttgaactggtgaaacacaaaccaaaggctacaaaagaacagcttaaagcagtgatggacgatttcgcagcatttgtcgaaaaatgctgcaaggctgatgacaaagagacgtgcttcgctgaagagggtaaaaagctcgtcgcggcgtctcaagcagcactcggcctctgattaattaatttttatgagctcatgcggatctttatgatacgtacaatgataatgatacagtaccaccaactactgtaggcggtagtacaacctctattagcaattataaaaccaaggactttgtagaaatatttggtattaccgcattaattatattgtcggccgtggcaatattctgtattacatattatatatataataaacgttcacgtaaatacaaaacagagaacaaagtctagatttttgacttacataaatgtctgggatagtaaaatctatcatattgagcggaccatctggttcaggaaagacagccatagccaaaagactatgggaatatatttggatttgtggtgtcccataccactagatttcctcgtcctatggaacgagaaggtgtcgattaccattacgttaacagagaggccatctggaagggaatagccgccggaaactttctagaacatactgagtttttaggaaatatttacggaacttctaaaactgctgtgaatacagcggctattaataatcgtatttgtgtgatggatctaaacatcgatggcgttagaagtcttaaaaatacgtacctaatgccttactcggtgtatataagacctacctctcttaaaatggttgagaccaagcttcgttgtagaaacactgaagcggatgatgagattcatcgtcgtgtgatgttggcaaaaactgacatggatgaggcaggtgaagccggtctattcgacactattatcattgaagatgatgtgaatttagcatatagtaagttaattcagatactacaggaccgtattagaatgtattttaacactaattagagacttaagacttaaaacttgataattaataatataactcgtttttatatgtggctatttcaacgtctaatgtattagttaaatattaaaacttaccacgtaaaacttaaaatttaaaatgatatttcattgacagatagatcacacattatgaactttcaaggacttgtgttaactgacaattgcaaaaatcaatgggtcgttggaccattaataggaaaaggtggattcggtagtatttatactactaatgacaataattatgtagtaaaaatagagcccaaagctaacggatcattatttaccgaacaggcattttatactagagtacttaaaccatccgttatcgaagaatggaaaaaatctcacaatataaagcacgtaggtcttatcacgtgcaaggcatttggtctatacaaatccattaatgtggaatatcgattcttggtaattaatagattaggtgcagatctagatgcggtgatcagagccaataataatagattaccaaaaaggtcggtgatgttgatcggaatcgaaatcttaaataccatacaatttatgcacgagcaaggatattctcacggagatattaaagcgagtaatatagtcttggatcaaatagataagaataaattatatctagtggattacggattggtttctaaattcatgtctaatggcgaacatgttccatttataagaaatccaaataaaatggataacggtactctagaatttacacctatagattcgcataaaggatacgttgtatctagacgtggagatctagaaacacttggatattgtatgattagatggttgggaggtatcttgccatggactaagatatctgaaacaaagaattgtgcattagtaagtgccacaaaacagaaatatgttaacaatactgcgactttgttaatgaccagtttgcaatatgcacctagagaattgctgcaatatattaccatggtaaactctttgacatattttgaggaacccaattacgacgagtttcggcacatattaatgcagggtgtatattattaagtgtggtgtttggtcgatgtaaaatttttgtcgataaaaattaaaaaataacttaatttattattgatctcgtgtgtacaaccgaaatcatggcgatgttttacgcacacgctctcggtgggtacgacgagaatcttcatgcctttcctggtaccaaaaattgaaaaactagcgtctttttttgctcgactgcagaccatggagacacccaagcctaggatactgccctggctcgtgagccagctcgatctcggccaactcgaaggtgtcgcttggttggacgagtcaaggacaagattcagaataccctggaagcatggcctgagacaggatgctcagatggccgattttggtatttttcaagcttgggccgaagcttctggtgcttacacccccggcaaggataaacctgatgtgtccacttggaaacggaatttccggtctgccttgaaccggaaggaagtgttgcgcctcgccgcagataactctaaagatccttacgaccctcacaaagtttatgagtttgttactcccggggcaagagattttgtgcatcttggggcttcacccgatactaatggaaaaagtagtcttccccacagtcaggagaatcttcccaaactttttgatgggcttattctcgggcccttgaaggatgaggggagttccgatttggcaatagtctctgacccaagccagcaactgccatcaccaaacgtcaacaattttctcaatccagccccccaagagaacccccttaaacagcttcttgccgaggagcaatgggagttcgaagttactgccttctatcgcgggaggcaggtattccaacaaaccttgttttgtccaggaggcttgagactcgtgggcagcactgctgatatgactctgccctggcagccagtgaccctccccgaccctgaagggttcctgactgacaaactcgtgaaggagtacgtgggacaagtactgaagggcctgggaaatggtcttgccctctggcaagctggacagtgcttgtgggctcaacgccttggacattcacacgcattttgggccctcggggaggagcttcttcctgacagtggccgcggaccagatggcgaggtacataaggataaagatggtgcagtcttcgacctcagaccatttgtcgcagaccttatcgccttcatggaaggttccggtcacagccctagatatacactttggttctgtatgggggaaatgtggccacaagatcaaccttgggtcaagcgccttgttatggtaaaggtggtccctacatgtttgaaagagctgctcgaaatggctcgggaaggaggagcctcttctttgaaaactgtagacctgcacatatctaacagccaaccaatcagcctgacctccgatcagtacaaagcttaccttcaagaccttgtcgaggacatggacttccaagccacaggcaacatttgattaattaatttttatgagctcctggtaaaagttaaacttggggagaatgatacagaaaatctttcttctactatatcggcggcaccatcgaggtaaccacctctcaagaagaccgcgtgaataatgtactcatgaaacgtttggaaactatacgccatatgtggtctgttgtatatgatcattttgatattgtgaatggtaaagaatgctgttatgtgcatacgcattcatctaatcaaaatcctataccgagtactgtaaaaacaaatttgtacatgaagactatgggatcatgcattcaaatggattccatggaagctctagagtatcttagcgaactgaaggaatcaggtggatggagtcccagaccagaaatgcaggaatttgaatatccagatggagtggaagacactgaatcaattgagagattggtagaggagttcttcaatagatcagaacttcaggctggtaaattagtcaaatttggtaattctattaattgttaaacatacatctgtttcagctaagcaactaagaacacgtatacggcagcagcttccttttatactctcatcttttaccaacacaaagggtggatatttgttcattggagttgataataatacacacaaagtatttggattcacggtgggttacgactacctcagactgatagagaatgatatagaaaagcatatcaaaagactttgtgttgtgcatttctgtgagaagaaagaggacatcaagtacacgtgtcgattcatcaaggtatataaacctggggatgaggctacctcgacatacgtgtgcgctatcaaagtggaaagatgctgttgtgctgtgtttgcagattggccagaatcatggtatatggatactaatggtatcaagaagtattctccagatgaatgggtgtcacatataaaattttaattaatgtaactatagagaacaaataataggttgtaatatcatatagacaataactaacaattaattagtaactgttatctcttttttaactaaccaactaactatatacctattaatacatcgtaattatagttcttaacatctattaatcattgattcgcttctttaattttttataaactaacattgttaattgaaaagggataacatgttacagaatataaattatatatggatttttttaaaaaggaaatacttgactggagtgtatatttatctcttcattatatagcacgcgtgtgttccaattcttccacatcccatataatacaggattataatctcgttcgaacatacgagaaagtggataaaacaatagttgattttttatctaggttgccaaatttattccatattttagaatatggggaaaatattctacatatttattctatggatgatgctaatacgaatattataattttttttctagatagagtattaaatattaataagaacgggtcatttatacacaatctcaggttatcatcatccattaatataaaagaatatgtatatcaattagttaataatgatcatccagataataggataagactaatgcttgaaaatggacgtagaacaagacattttttgtcctatatatcagatacagttaatatctatatatgtattttaataaatcatggattttatatagatgcagaagacagttacggttgtacattattacatagatgtatatatcactataagaaatcagaatcagaatcatacaatgaattaattaagatattgttaaataatggatccgatgtagataaaaaagatacgtacggaaacacaccttttatcctattatgtaaacacgatatcaacaacgtggaattgtttgagatatgtttagagaatgctaatatagactctgtagactttaatagatatacacctcttcattatgtctcatgtcgtaataaatatgattttgtaaagttattaatttctaaaggagcaaatgttaatgcgcgtaataaattcggaactactccattttattgtggaattatacacggtatctcgcttataaaactatatttggaatcagacacagagttagaaatagataatgaacatatagttcgtcatttaataatttttgatgctgttgaatctttagattatctattatccagaggagttattgatattaactatcgtactatatacaacgaaacatctatttacgacgctgtcagttataatgcgtataatacgttggtctatctattaaacagaaatggtgattttgagacgattactactagtggatgtacatgtatttcggaagcagtcgcaaacaacaacaaaataataatggaagtactattgtctaaacgaccatctttgaaaattatgatacagtctatgatagcaattactaaaaataaacaacataatgcagatttattgaaaatgtgtataaaatatactgcgtgtatgaccgattatgatactcttatagatgtacagtcgctacagcaatataaatggtatattttaaaatgtttcgatgaaatagatatcatgaagagatgttatataaaaaataaaactgtattccaattagttttttgtatcaaagacattaatactttaatgagatatggtaaacatccttctttcgtgaagtgcactagtctcgacgtatacggaagtcgtgtacgtaatatcatagcatctattagatatcgtcagagattaattagtctattatccaagaagctggatgcgggagataaatggtcgtgttttcctaacgaaataaaatataaaatattggaaaactttaacgataacgaactatccacatatctaaaaatcttataaacactattaaaatataaaatctaagtaggataaaatcacactacatcattgtttccttttagtgctcgacagtgtatactatttttaacactcataaataaaaatgaaaacgatttccgttgttacgttgttatgcgtactacctgctgttgtttattcaacatgtactgtacccactatgaataacgctaaattaacgtctaccgaaacatcgtttaatgataaacagaaagttacatttacatgtgatcagggatatcattctttggatccaaatgctgtctgcgaaacagataaatggaaatacgaaaatccatgcaagaaaatgtgcacagtttctgattatgtctctgaattatatgataagccattatacgaagtgaattccaccatgacactaagttgcaacggcgaaacaaaatattttcgttgcgaagaaaaaaatggaaatacttcttggaatgatactgttacgtgtcctaatgcggaatgtcaacctcttcaattagaacacggatcgtgtcaaccagttaaagaaaaatactcatttggggaatatatgactatcaactgtgatgttggatatgaggttattggtgcttcgtacataagttgtacagctaattcttggaatgttattccatcatgtcaacaaaaatgtgatataccgtctctatctaatggattaatttccggatctacattttctatcggtggcgttatacatcttagttgtaaaagtggttttatactaacgggatctccatcatccacatgtatcgacggtaaatggaatcccatactcccaacatgtgtacgatctaacgaaaaatttgatccagtggatgatggtcccgacgatgagacagatttgagcaaactctcgaaagacgttgtacaatatgaacaagaaatagaatcgttagaagcaacttatcatataatcatagtggcgttaacaattatgggcgtcatatttttaatctccgttatagtattagtttgttcctgtgacaaaaataatgaccaatataagttccataaattgctaccgtaaatataaatccgttaaaataattaataatttaataacaaacaagtatcaaaagattaaagacttatagctagaatcaattgagatgtcttcttcagtggatgttgatatctacgatgccgttagagcatttttactcaggcactattataacaagagatttattgtgtatggaagaagtaacgccatattacataatatatacaggctatttacaagatgcgccgttataccgttcgatgatatagtacgtactatgccaaatgaatcacgtgttaaacaatgggtgatggatacacttaatggtataatgatgaatgaacgcgatgtttctgtaagcgttggcaccggaatactattcatggaaatgtttttcgattacaataaaaatagtatcaacaatcaactaatgtatgatataattaatagcgtatctataattctagctaatgagagatatagaagcgcttttaacgacgatggtatatacatccgtagaaatatgattaacaagttgtacggatacgcatctctaactactattggcacgatcgctggaggtgtttgttattatctgttgatgcatctagttagtttgtataaataattatttcaatatactagttaaaattttaagattttaaatgtataaaaaactaataacgtttttatttgtaataggtgcattagcatcctattcgaataatgagtacactccgtttaataaactgagtgtaaaactctatatagatggagtagataatatagaaaattcatatactgatgataataatgaattggtgttaaattttaaagagtacacaatttctattattacagagtcatgcgacgtcggatttgattccatagatatagatgttataaacgactataaaattattgatatgtataccattgactcgtctactattcaacgcagaggtcacacgtgtagaatatctaccaaattatcatgccattatgataagtacccttatattcacaaatatgatggtgatgagcaacaatattctattactgcagagggaaaatgctataaaggaataaaatatgaaataagtatgatcaacgatgatactctattgagaaaacatactcttaaaattggatctacttatatatttgatcgtcatggacatagtaatacatattattcaaaatatgatttttaaaaatttaaaatatattatcacttcagtgacagtagtcaaataacaaacaacaccatgagatatattataattctcgcagttttgttcattaatagtatacacgctaaaataactagttataagtttgaatccgtcaattttgattccaaaattgaatggactggggatggtctatacaatatatcccttaaaaattatggcatcaagacgtggcaaacaatgtatacaaatgtaccagaaggaacatacgacatatccgcatttccaaagaatgatttcgtatctttctgggttaaatttgaacaaggcgattataaagtggaagagtattgtacgggactatgcgtcgaagtaaaaattggaccaccgactgtaacattgactgaatacgacgaccatatcaatttgtacatcgagcatccgtatgctactagaggtagcaaaaagattcctatttacaaacgcggtgacatgtgtgatatctacttgttgtatacggctaacttcacattcggagattctaaagaaccagtaccatatgatatcgatgactacgattgcacgtctacaggttgcagcatagactttgtcacaacagaaaaagtgtgcgtgacagcacagggagccacagaagggtttctcgaaaaaattactccatggagttcgaaagtatgtctgacacctaaaaagagtgtatatacatgcgcaattagatccaaagaagatgttcccaatttcaaggacaaaatggccagagttatcaagagaaaatttaataaacagtctcaatcttatttaactaaatttctcggtagcacatcaaatgatgttaccacttttcttagcatgcttaacttgactaaatattcataactaatttttattaatgatacaaaaacgaaataaaactgcatattatacactggttaacgcccttataggctctaaccattttcaagatgaggtccctgattatagtccttctgttcccctctatcatctactccatgtctattagacgatgtgagaagactgaagaggaaacatggggattgaaaatagggttgtgtataattgccaaagatttctatcccgaaagaactgattgcagtgttcatctcccaactgcaagtgaaggattgataactgaaggcaatggattcagggatatacgaaacaccgataaattataaaaaaagcaatgtgtccgctgtttccgttaataatactattttcgtaactggcggattattcataaataactctaatagcacgatcgtggttaacaatatggaaaaacttgacatttataaagacaaacaatggtcgattatagaaatgcctatggctagggtatatcacggcatcgactcgacatttggaatgttatattttgccggaggtctatccgttaccgaacaatatggtaatttagagaaaaacaacgagatatcttgttacaatcctagaacgaataagtggtttgatatttcatatactatttataagatatccatatcatcattgtgtaaactaaataacgtcttctatgtatttagtaaggacattggatatgtggaaaagtatgatggtgcatggaagttagtacatgatcgtctccccgctataaaggcattatcaacttctccttattgattgaaaatgaaaatataaatagtttttatgtatagcagtattaccctatagttttattgcttactactaacatggatacagatgttacaaatgtagaagatatcataaatgaaatagatagagagaaagaagaaatactaaaaaatgtagaaattgaaaataataaaaacattaacaagaatcatccaagtggatatattagagaagcactcgttattaatacaagtagtaatagtgattccattgataaagaagttatagaatgtatcagtcacgatgtaggaatatagatcatatctactaatttttataatcgatacaaaacataaaaaacaactcgttattacatagcaggcatggaatccttcaagtattgttttgataacgatggcaagaaatggattatcggaaatactttatattctggtaattcaatactatataaggtcagaaaaaatttcactagttcgttctacaattacgtaatgaaaatagatcacaaatcacacaagccattgttgtctgaaatacgattctatatatctgtattggatcctttgactatcgacaactggacacgggaacgtggtataaagtatttggctattccagatctgtatggaattggagaaaccgatgattatatgttcttcgttataaagaattcgggaagagtattcgccccaaaggatactgaatcagtcttcgaagcatgcgtcactatgataaacacgttagagtttatacactctcgaggatttacccatggaaaaatagaaccgaggaatatactgattagaaataaacgtctttcactaattgactattctagaactaacaaactatacaagagtggaaactcacatatagattacaacgaggacatgataacttcaggaaatatcaattatatgtgtgtagacaatcatcttggagcaacagtttcaaaacgaggagatttagaaatgttgggatattgcatgatagaatggttcggtggcaaacttccatggaaaaacgaaagtagtataaaagtaataaaacaaaaaaaagaatataaaaaatttatagctactttctttgaggactgttttcctgaaggaaatgaacctctggaattagttagatatatagaattagtatacacgttagattattctcaaactcctaattatgacagactacgtaaactgtttatacaagattgaaattatattctttttttatagagtgtggtagtgttacggatatctaatattaatattagactatctctatcgcgctacacgaccaatatcgattactatggatatcttcagggaaatcgcatcttctatgaaaggagagaatgtattcatttctccagcgtcaatctcgtcagtattgacaatactgtattatggagctaatggatccactgctgaacagctatcaaaatatgtagaaacggaggagaacacggataaggttagcgctcagaatatctcattcaaatccatgaataaagtatatgggcgatattctgccgtgtttaaagattcctttttgagaaaaattggcgataagtttcaaactgttgacttcactgattgtcgcactatagatgcaatcaacaagtgtgtagatatctttactgaggggaaaatcaatccactattggatgaaccattgtctcctgatacctgtctcctagcaattagtgccgtatactttaaagcaaaatggttgatgccattcgaaaaggaatttaccagtgattatcccttttacgtatctccgacggaaatggtagatgtaagtatgatgtctatgtacggcaaggcatttaatcacgcatctgtaaaggaatcattcggcaacttttcaatcatagaactgccatatgttggagatactagtatgatggtcattcttccagacaagattgatggattagaatccatagaacaaaatctaacagatacaaattttaagaaatggtgtaactctctggaagctacgtttatcgatgttcacattcccaagtttaaggtaacaggttcgtataatcttgtggatactctagtaaagtcaggactgacagaggtgttcggttcaactggagattatagcaatatgtgtaattcagatgtgagtgtcgacgctatgattcacaaaacgtatatagatgtcaatgaagagtatacagaagcagctgcagcaacttgtgcactggtgtcagactgtgcatcaacaattacaaatgagttctgtgtagatcatccgttcatctatgtgattaggcatgttgatggaaaaattcttttcgttggtagatattgctctccgacaactaattgttaaccattttttttaaaaaaatagaaaaaacatgtggtattagtgcaggtcgttgttcttccaattgcaattggtaagatgacggccaactttagtacccacgtcttttcaccacagcactgtggatgtgacagactgaccagtattgatgacgtcagacaatgtttgactgaatatatttattggtcgtcctatgcataccgcaacaggcaatgcgctggacagttgtattccacactcctctcttttagagatgatgcggaatcagtgttcatcgacattcgcgagctggtaaaaaatatgccgtgggatgatgtcaaagattgtacagaaatcatccgttgttatataccggatgagcaaaaaaccatcagagagatttcggccatcatcggactttgtgcatatgctgctacttactggggaggtgaagaccatcccactagtaacagtctgaacgcattgtttgtgatgcttgagatgctcaattacgtggattataacatcatattccggcgtatgaattgatgagttgtacatcttgacattttctttcttctcttctccctttcttctcttctcccttcctccctcttctccctttcccagaaacaaacttttttacccactataaaataaaatgagtatactacctattatatttcttcctatatttttttattcttcattcgttcagacttttaacgcgcctgaatgtatcgacaaagggcaatattttgcatcattcatggagttagaaaacgagccagtaatcttaccatgtcctcaaataaatacgctatcatccggatataatatattagatattttatgggaaaaacgaggagcggataatgatagaattataccgatagataatggtagcaatatgctaattctgaacccgacacaatcagactctggtatttatatatgcattaccacgaacgaaacctactgtgacatgatgtcgttaaatttgacaatcgtgtctgtctcagaatcaaatatagatcttatctcgtatccacaaatagtaaatgagagatctactggcgaaatggtatgtcccaatattaatgcatttattgctagtaacgtaaacgcagatattatatggagcggacatcgacgccttagaaataagagacttaaacaacggacacctggaattattaccatagaagatgttagaaaaaatgatgctggttattatacatgtgttttagaatatatatacagaggtaaaacatataacgtaaccagaattgtaaaattagaggtacgggataaaataataccttctactatgcaattaccagatggcattgtaacttcaataggtagtaatttgactattgcgtgtagagtatcgttgagacctcccacaacggatgcagacgtcttttggataagtaatggtatgtattacgaagaagatgatggggacggagacggtagaataagtgtagcaaataaaatctatatgaccgataagagacgtgttattacatcccggttaaacattaatcctgtcaaggaagaagatgctacaacgtttacgtgtatggcgtttactattcctagcatcagcaaaacagttactgttagtataacgtgaatgtatgttgttacatttccatgtcaattgagtttataagaatttttatacattatcttccaacaaacaattgacgaacgtattgctatgattaactcccacgatactatgcatattattaatcattaacttgcagactatacctagtgctattttgacatactcatgttcttgtgtaattgcggtatctatattattaaagtacgtaaatctagctatagttttattatttaattttagataatataccgtctccttatttttaaaaattgccacatcctttattaaatcatgaatgggaatttctatgtcatcgttagtatattgtgaacaacaagagcagatatctataggaaagggtggaatgcgatacattgatctatgtagttttaaaacacacgcgaactttgaagaatttatataaatcattccatcgatacatccttctatgttgacatgtatatatccaggaattcttttattaatgtcaggaaatgtataaactaaaacattgcccgaaagcggtgcctctatctgcgttatatccgttcttaacttacaaaatgtaaccaatacctttgcatgacttgttttgttcggcaacgttagtttaaacttgacgaatggattaattacaatagcatgatccgcgcatctattaagtttttttactttaacgcccttgtatgtttttacagagactttatctaaatttctagtacttgtatgtgttataaatataacgggatatagaactgaatcacctaccttagatacccaattacattttatcagatccagataataaacaaattttgtcgccctaactaattctatattgttatatattttacaattggttatgatatcatgtaataacttggagtctaacgcgcatcgtcgtacgtttatacaattgtgatttagtgtagtatatctacacatgtatttttccgcactatagtattctggactagtgataaaactatcgttatatctgtcttcaatgaactcatcgagatattgctctctgtcatattcatacacctgcataaactttctagacatcttacaatccgtgttattttaggatcatatttacatatttacgggtatatcaaagatgttagattagttaatgggaatcgtctataataatgaatattaaacaattatatgaggacttttaccacaaagcatcataaaaatgagtcgtcgtctgatttatgttttaaatatcaaccgcaaatcaactcataaaatacaagagaatgaaatatatacatattttagtcattgcaatatagaccatacttctacagaacttgattttgtagttaaaaactatgatctaaacagacgacaacatgtaactgggtatactgcactacactgctatttgtataataattactttacaaacgatgtactgaagatattattaaatcatgacgtaaatgtaacgatgaaaaccagtagcggacgtatgcctgtttatatattgcttactagatgttgcaatatttcacatgatgtagtgatagatatgatagacaaagataaaaaccacttattacatagagactattccaacctattactagagtatataaaatctcgttacatgttattaaaggaagaggatatcgatgagaacatagtatccactttattagataagggaatcgatcctaactttaaacaagacggatatacagcgttacattattattatttgtgtctcgcacacgtttataaaccaggtgagtgtagaaaaccgataacgataaaaaaggccaagcgaattatttctttgtttatacaacatggagctaatctaaacgcgttagataattgtggtaatacaccattccatttgtatcttagtattgaaatgtgtaataatattcatatgactaaaatgctgttgacttttaatccgaatttcaaaatatgtaataatcatggattaacgcctatactatgttatataacttccgactacatacaacacgatattcttgttatgttaatacatcactatgaaacaaatgttggagaaatgccgatagatgagcgtcgtatgatcgtattcgagtttatcaaaacatattctacacgtccggcagattcgataacttatttgatgaataggtttaaaaatataaatatttatacccgctatgaaggaaagacattattacacgtagcatgtgaatataataatacacacgtaatagattatcttatacgtatcaacggagatataaatgcgttaaccgacaataacaaacacgctacacaactcattatagataacaaagaaaattccccgtataccatcgattgtttactgtatatacttagatatattgtagataagaatgtgataagatcgttggtggatcaacttccatctctacctatcttcgatataaaatcatttgagaaattcatatcctactgtatacttttagatgacacattttacgataggcacgttaagaatcgcgattctaaaacgtatcgatacgcattttcaaaatacatgtcgtttgataaatacgatggtataataactaaatgtcacgacgaaacaatgttactcaaactgtccactgttctagacactacactatatgcagttttaagatgccataattcgaaaaagttaagaagatacctcaacgagttaaaaaaatataataacgataagtcctttaaaatatattctaatattatgaatgagagataccttaatgtatattataaagatatgtacgtgtcaaaggtatatgataaactatttcctgttttcacagataaaaattgtctactaacattactaccttcagaaattatatacgaaatattatacatgctgacaattaacgatctttataatatatcgtatccacctaccaaagtatagttgtatttttctcatgcgatgtgtgtaaaaaaactgatattatataaatattttagtgccgtataataaagatgacgatgaaaatgatggtacatatatatttcgtatcattattgttattgctattccacagttacgccatagacatcgaaaatgaaatcacagaattcttcaataaaatgagagatactctaccagctaaagactctaaatggttgaatccagcatgtatgttcggaggcacaatgaatgatatagccgctctaggagagccattcagcgcaaagtgtcctcctattgaagacagtcttttatcgcacagatataaagactatgtggttaaatgggagaggctagaaaagaatagacggcgacaggtttctaataaacgtgttaaacatggtgatttatggatagccaactatacatctaaattcagtaaccgtaggtatttgtgtaccgtaactacaaagaatggtgactgtgttcagggtatagttagatctcatattaaaaaacctccttcatgcattccaaaaacatatgaactaggtactcatgataagtatggcatagacttatactgtggaattctttacgcaaaacattataataatataacttggtataaagataataaggaaattaatatcgacgacattaagtattcacaaacgggaaagaaattaattattcataatccagagttagaagatagtggaagatacaactgttacgttcattacgacgacgttagaatcaagaatgatatcgtagtatcaagatgtaaaatacttacggttataccgtcgcaagaccacaggtttaaactaatactagatccaaaaatcaacgtaacgataggagaacctgccaatataacatgcactgctgtgtcaacgtcattattgattgacgatgtactgattgaatgggaaaatccatccggatggcttataggattcgattttgatgtatactctgttttaactagtagaggcggtattaccgaggcgaccttgtactttgaaaatgttactgaagaatatataggtaatacatataaatgtcgtggacacaactattattttgaaaaaacccttacaactacagtagtattggagtaaatacacaatgcatttttatatacattactgaataattattattattatttatatcgtatttgtgctataacgcgactatctaggtatttgtatctcactgatagagaacatataaatatagactctattaaacagttgtgtaaaatatcaaatcctaatagatgtggatgtacggctttacatgagtacttttataattatagatcagtcaacggaaaatacaagtatagatacaacggttactatcaatattatttatctagcgattatgaaaattataatgaatattattatgatgattatgatagaactggtatgaacagtgagagtgataatatatcaatcaaaacagaatatgaattctatgatgaaacacaagatcaaagtacacaactagtaggttacgacattaaactcaaaaccaatgaggatgattttatggctatgatagatcagtgggtgtccatgattatatagatgaatcaattaataaagtagtatatggaagagagtctcacgtaagatggcgggatatatggcaagaacataatgatggcgtatacagtataggaaaggagtgcatagataatatatacgaagacaaccataccgtagacgaattctacaagatagacagcgtatcagatgtagatgacgcggaacacatatctccgataactaatgatgtatctacacaaacatgggaaaagaaatcagagttagatagatacatggaaatgtatcctcgtcatagatatagtaagcattctgtctttaagggattttctgacaaagttagaaaaaatgatttagacatgaatgtggtaaaagaattactttctaacggtgcatctctaacaattaaggatagcagtaataaggatccaataaccgtttattttcgaagaacgataatgaatttagaaatgattgatattattaacaaacatacaactattgatgaacgaaagtatatagtacactcctatctaaaaaattataaaaatttcgattatccatttttcaggaagttagttttgactaataaacattgtctcaacaattattataatataagcgacagcaaatatggaacaccgctacatatattggcgtctaataaaaaattaataactcctaattacatgaagttattagtgtataacggaaatgatataaacgcacgaggtgaagatacacaaatgcgaactccattacacaaatatttgtgtaaatttgtatatcataatattgaatatggtatccgatactataatgaaaagattatagacgcatttatagagttaggagccgatctaactattccaaataacgatggaatgataccagtagtttactgtatacactcaaatgcagaatatggttataacaatattactaacataaagataatacgtaaactacttaatcttagtagacgtgcgtcacataatctatttagagatcgagtcatgcacgattatataagtaatacatatattgatcttgagtgtttagatattattagatcgttggatggattcgatatcaatggttactttgaaggacgtacaccacttcattgcgctatacaacataacttcactcagattgctaagtacttattagatcgaggagctgatatagtcgtacccaacacattgattatacatcagtacatacagtaaatagcatagatatggaggaggatacaaatatttcaaataaagttataaggtacaacactgtcaataatatatggaagacattacctaacttctggactggaactataaatccaggcgtggtctcgcataaagatgatatatatgttgtatgcgacatcaaagatgaaaaaaatgttaagacttgtatatttagatataacacgaatacgtataacggatgggaattggttacgacgacagaaagcagattatcagctctgcatactattcttcatgacaataccataatgatgttacattgttatgaatcgtatatgttacaagatacatttaatgtgtacactcgcgaatggaatcatatgtgtcatcaacattcgaatagttatatcatgtacaatatactacccatctactaaatataatagaataaaataaatgagtatgatcattttagataacgattgattttatcattaccgcttcattcttatattctttgcttacggaacctatatttagaaacatctactaacgattttttatgcttgcattattaatggtatgtaatatgattgattgtgtacgcaataccaatttgttaagtatgaatacggggtacaaacataaactgaaatttaacattatttatttatgatatatatcgttatcgttattgtttggtctataccatggatatctttaaagaactaatcttaaaacaccctgatgaaaatgttttgatttctccagtttctattttatctactttatctattctaaatcatggagcagctggttctacagctgaacaactatcaaaatatatagagaatatgaatgagaatacacccgatgataagaaggatgacaataatgacatggacgtagatattccgtattgtgcgacactagctaccgcaaataaaatatacggtagcgatagtatcgagttccacgcctccttcctacaaaaaataaaagacgattttcaaactgtaaactttaataatgctaaccaaacaaaggaactaatcaacgaatgggttaagacgatgacaaatggtaaaattaattccttattgactagtccgctatccattaatactcgtatgacagttgttagcgccgtccattttaaagcaatgtggaaatatccattttctaaacatcttacatatacagacaagttttatatttctaagaatatagttaccagtgttgatatgatggtgggtaccgagaataacttgcaatatgtacatattaatgaattattcggaggattctctattatcgatattccatacgagggaaactctagtatggtaattatactaccggacgacatagaaggtatatataacatagaaaaaaatataacagatgaaaaatttaaaaaatggtgtggtatgttatctactaaaagtatagacttgtatatgccaaagtttaaagtggaaatgacagaaccgtataatctggtaccgattttagaaaatttaggacttactaatatattcggatattatgcagattttagcaagatgtgtaatgaaactatcactgtagaaaaatttctacatacgacgtttatagatgttaatgaggagtatacagaagcatcggccgttacaggagtatttatgactaacttttcgatggtatatcgtacgaaggtctacataaaccatccattcatgtacatgattaaagacaacacaggacgtatactttttatagggaaatactgctatccgcaataaatataaacaaatagacttttatcacgtttatctatgtctaaatattacaaatagtaatagtataaactaaagctgataatacttaaaaaaataataatatcatttacaattaatagtataaactaaaaattaaacaaatcgttattataagtaatatcaaaatgatgatatacggattaatagcgtgtcttatattcgtgacttcatccatcgctagtccactttatattcccgttattccacccattacggaagataaatcgttcaatagtgtagaggtattagtttccttgtttagagatgaccaaaaagactatacggtaacttctcagttcaataactacactatcgataccaaagactggactatcggcgtactatccacacctgatggtttggatataccattgactaatataacttattggtcacggtttactataggtcgtgcattgttcaaatcagagtctgaggatattttccaaaagaaaatgagtattctaggtgtttctatagaatgtaagaagtcgtcgacattacttacttttttgaccgtgcgtaaaatgactcgagtatttaataaatttccagatatggcttattatcgaggagactgtttaaaagccgtttatgtaacaatgacttataaaaatactaaaactggagagactgattacacgtacctctctaatggggggttgcctgcatactatcgtaatggggtcgatggttgattattgattagtatattccttattcacacaaaaagaacatttttataaacatgaaaccactgtctaaatgtaattatgatcttgatttatagatgaagatcagcctttagaggattttaaccagtatgtttaatatgaaaaaaataaacataacatattttgagattaagcgctattgtgcttaattattttgctctataaactgaatatatagccacaattattgacgggcttgtttatgaccggcaatcatgaatttacagaaattatctctggctatatatcttactgcgacatgttcgtggtgttatgaaacatgcataagaaaaactgcgttgtatcatgacattcaattggagcatgtagaagacaataaagatagtgtagcgtcgctaccgtacaagtagtcaatcaaagagaacgtagtagattgttggctacatttaattggacagatatagctgagggtgttagaaatgagttcattaaaatatgtgatatcaacggaacatatttatataattatactattgctgttagtataattattgattccacggaagaactaccaacagttactccaattacaacaacatatgaaccttctacatataattatactatcgatgatagcactgttattactactgaagaactacaagtgactcctcatatggatctccatcgatgatacatgtattaaaatactttccgaataagtcttttaaatattgtattaattatgaaaaactatgctatgcgagtatgatgcaaagatgtttaatgatacgatactagattttatctctagcgagagatgtcgttagaatcatttatcataactacgtttaataataattcatcaacgaatatcgataacatgtgtcatttatacgttaaagtctgtccgtcttctctattgtttagactgtttgtagaatgctgtgatataaacaaactagtagaaggtacgactccgttacactgttatctaatgaatgaaggatttgaatcatctgttttaaaaaacctattaaaggagtatgtcatgaatacgtttaatgttcatgacatccattacacaaatatttaactcatgatgaagttgagaatgatatgctttctgatagtatagatagctttagctaatataaaaatatattaatccactatatattctagacttgatttaaaaccgataaactactactacgtactgtataagttgttaaaaaaaggagcagaccctaattatgtagatgatagaggtaatacttttcttcattacttctgcatctatatgtccacttatgagaaaacgtcatttaataagatgcatcgtgaaaagaaatttattaaagagttggtaaaatatgaaaccgaaagtaaataatataggaaatacacctctacataactacgtatctcaatatgatatcactctcattcctcatccacaacccattaaaaaaatggaaattaaagccctctattagcataaacggctacaggtctacctttacaatggcctctccttgtgcccagttcagaccctgtcattgccacgctactaaggactccctgaataccgtggccgacgtcagacattgtctgactgaatacatcctgtgggtttctcatagatggacccatagagaaagcgcagggtctctctacaggcttctcatctctttcagaactgatgcaacggagctctttggtggtgagttgaaggattcacttccgtgggacaatatcgacaattgcgtggagatcattaaatgtttcatcagaaatgactccatgaaaaccgccgaagaacttcgtgcaatcattggactttgtactcaatcagctatcgtctctggaagagtcttcaacgataagtatatcgacatactacttatgctgcgaaagattctgaacgagaacgactatctcaccctcttggatcatatccgcactgctaaatactaaatctccttcatgctctctcactacactttttatcatcttatgaggaatgattgccttcatcatttttcgtgaaataggaataattagcaccagaatagctatggattgcacatgtattctatgtcgtctactggatgaagatgtgacgtacaaaaaaataaaactagaaattgaaacgtgtcacaacttatcaaaacatatagatagacgaggaaacaatgcgctacattgttacgtcttcaataaatgcgatacagacattaagattgttcgactgttactctctcgcggagtcgagagactttgtagaaacaacgaaggattaactccgctaggagcatacagtaagcatagatacgtaaaatctcaaattgtgcatctactgatatccagctattcgaattcctctaacgaactcaagtcgaatataaatgatttcgatctgtattcgtatatgtcttcggataatatcgacttacgtctgctaaaatacctaattgtggataaacggatacgtccgtccaagaatacgaattatgcaatcaatggtctcggattggtggatatatacgtaacgacgcctaatccgagaccagaagtattgctatggcttcttaaatcagaatgttacagcaccggttacgtatttcgtacctgtatgtacgacagtgatatgtgtaagaactctcttcattactatatatcgtctcatagagaatctcaatctctatccaaggatgtaattaaatgtttgatcaataacaatgtttccatccatggcagagacgaaggaggatctttacccatccaatactactggtcttgctcaaccatagatatagagattgttaaattattaataaaggatgtggacacgtgtagagtatacgacgtcagccctatattagaggcggattatctaaacaagcgatttagagtaaccccatataatgtagacatggaaatcgttaatcttcttattgagagacgtcatactcttgtcgacgtaatgcgtagtattacttcttacgattccagagactataaccactacatcatcgataacattctaaagagatttagacaacaggatgaatccatcgtacaagccatgttgataaactacttacattacggcgatatggtcgttcgatgcatgttagataacggacaacaactatcctctgcacgactactttgttaataataatctcgtcgatgtaaacgtcgtaaggtttatcgtggaaaataatggacacatggctgtaaatcacgtatcgaacaatggccgtctatgtatgtacggtctgatattatcgagatttaataattgcgggtatcactgttatgaaaccatactaatagatgtatttgatatactaagcaagtacatggataatatagatatgatcgataatgagaataaaactctactatattacgcggtcgatgtcaataatatacaatttgcaaagcggttattggaatatggagcgagtgttacaacatcacgctcgataatcaatacggccatccagaaaagtagttacagaagagaaaacaaaacgaggatagttgatttattacttagctaccatcccactctagagactatgattgacgcatttaatagagatatacgctatctatatcctgaaccattattcgcctgtatcagatacgccttaatcctagatgatgattttccttctaaagtaagtatgatatctccggtcgtcataaggaactaaagcgctatagagtagacattaatagaatgaagaatgcctacatatcaggcgtctccatgtttgatatattatttaaacgaagcaaacgccacagattgagatacgcaaagaatccgacatcaaatggtacaaaaaagaactaacgtccatcattacagaaactgtaaagaacaatgagaggatcgactccatagtggacaacattaatacagacgataacttgatttcgaaattacccatggagatactttattactccattaaataatttatcatggagcgataatgtcctgtttcatttgtttccatgacatattacaaaatcgattccgtccaagatgataaaaacatttaccggcatcataaacacggagtttattttatatgtctcgcataaacattactaaaaaaatatattgttcggttttctttcacatctttaattatgaaaaagtaaatcattatgagatggacgagattgtacgcatcgttcgcgacagtatgtggtacatacctaacgtatttatggacgacggtaagaatgaaggtcacgtttctgtcaacaatgtttgtcatatgtattttacgttctttgatgtggatacatcgtctcatctgtttaagctagttattaaacactgcgatctgaataaacgaggtaactctccattacattgctatacgatgaatacacgatttaatccatctgtattaaagatattgttacaccacggcatgcgtaactttgatagcaaggatgaaaaaggacatattcctctacaccactatctgattcattcactatcaatcgataacaagatctttgatatactaacggacaccattgatgactttagtaaatcatccgatctattgctgtgttatcttagatataaattcaatgggagcttaaactattacgttctgtacaaaggatccgaccctaattgcgtcgacgaggatggactcacttctcttcattactactgtaaacacatatccacgttctacaaaagcaattattacaagttaagtcacactaagatgcgagccgagaagcgattcatctacgcgataatagattatggagcaaacattaacgcggttacacacttaccttcaacagtataccaaacatagtcctcgtgtggtgtatgctcttttatctcgaggagccgatacgaggatacgtaataatcttgattgtacacccatcatggaacgattgtgcaacaggtcatattctcataatgttactcaattggcacgaacaaaaggaagaaggacaacatctactttatctattcataaaacataatcaaggatacactctcaatatactacggtatctactagataggttcgacattcagaaagacgaatactataataccgcctttcaaaattgtaacaacaatgttgcctcatacatcggatacgacatcaaccttccgactaaagacggtattcgacttggtgtttgaaaacagaaacatcatatacaaggcggatgttgtgaatgacatcatccaccacagactgaaagtatctctacctatgattaaatcgttgttctacaagatgtcagaattctctccctacgacgattactacgtaaaaaagatactagcctactgcctattaagggacgagtcattcgcggaactacatagtaaattctgtttaaacgaggactataaaagtgtatttatgaaaaatatatcattcgataagatagattccatcatcgtgacataagtcgccttaaagagattcgaatctccgacaccgacctgtatacggtatcacagctatcttaaagccatacattcggacagacacatttcatttcccatgtacgacgatctcatagaacagtgccatctatcgatggagcataaaagtaaactcgtcgacaaagcactcaataaattagagtctaccatcggtcaatctagactatcgtatttgcctccggaaattatgcgcaatatcatctaaacagtatgttgtacggaaagaaccattacaaatattatccatgatagaaagaaaatatctatatgattggagaagtaggaaacaggaacaagacgacgattactacattattaaatcatgaagtccgtattatactcgtatatattgtttctctcatgtataataataaacggaagagatatagcaccgcatgcaccatccgatggaaagtgtaaagacaacgaatacaaacgccataatttgtgtccgggaacatacgcttccagattatgcgatagcaagactaacacacgatgtacaccctgtggttcgggtaccttcacatctcgcaataatcatttacccgcttgtctaagttgtaacggaagacgcgatcgtgtaacacgactcacaatagaatctgtgaatgctctcccggatattattgtcttctcaaaggatcatccggatgcaaggcatgtgtttcccaaacaaaatgtggaataggatacggagtatccggagacgtcatctgttctccgtgtggtctcggaacatattctcacaccgtctcttccgcagataaatgcgaacccgtacccagtaatacctttaactatatcgatgtggaaattaatctgtatcccgtcaacgacacgtcgtgtactcggacgaccactaccggtctcagtgaatccatctcaacgtcggaactaactattactatgaatcataaagactgtaatcccgtatttcgtgaggaatacttctctgtccttaataaggtagcaacttcaggtttctttacaggagaaaggtgtgcactctgaatttcgagattaaatgcaataacaaagattcttcctccaaacagttaacgaaagcaaagaatgatgacggtatcatgccgcattcggagacagtaactctagtgggcgactgtatatctagcgtcgacatctatatactatatagtaataccaatactcaagactacgaaactgatacaatctcttatcatgtgggtaatgttctcgatgtcgatagccatatgcccggtagttgcgatatacataaactgatcactaattccaaacccacccgctttttatagtaagtttttcacccataaataataaatacaataattaatttctcgtaaaagtagaaaatatattctaatttattgcatggtaaggaagtagaatcataaagaacagtactcaatcaatagcaattatgaaacaatatatcgtcctggcatgcatgtgcctgccagtcttcagcaatcatcctcatcctcatcctcgtgtacggaagaagaaaacaaacatcatatgggaatcgatgttattatcaaagtcacaaagcaagaccaaacaccgaccaatgataagatttgccaatccgtaacggaaattacagagtccgagtcagatccaaatcccgaggtggaatcagaagatgattccacatcagtcgaggatgtagatcctcctaccacttattactccatcatcggtggaggtctgagaatgaactttggattcaccaaatgtcctcagattaaatccatctcagaatccgctgatggaaacacagtgaatgctagattgtccagcgtgtccccaggacaaggtaaggactctcccgcgatcactcatgaagaagctcttgctatgatcaaagactgtgaggtgtctatcgacatcagatgtagcgaagaagagaaagacagcgacatcaagacccatccagtactcgggtctaacatctctcataagaaagtgagttacgaagatatcatcggttcaacgatcgtcgatacaaaatgtgtcaagaatctagagtttagcgttcgtatcggagacatgtgcaaggaatcatctgaacttgaggtcaaggatggattcaagtatgtcgacggatcggcatctgaaggtgcaaccgatgatacttcactcatcgattcaacaaaactcaaagcgtgtgtctgaatcgataactctattcatctgaaattggatgagtagggttaatcgaacgattcaggcacaccacgaattaaaaaagtgtaccggacactatattccggtttgcaaaacaaaaatgttcttaactacattcacaaaaagttacctctcgcgacttcttctttttctgtctcaatagtgtgatacgattatgacactattcctattcctattcctatttcctttcagggtatcacaaaaatattaaacctctttctgatggtctcataaaaaaagttttacaaaaatatttttattctctttctctctttgatggtctcataaaaaaagttttacaaaaatatttttattctctttctctctttgat

SEQ ID NO: 88 - DNA, 201134 bp, Vaccinia virus
  source 1..201134: mol_type = genomic DNA
  misc_feature 1..201134: note = VIR113
atcaaagagagaaagagaataaaaatatttttgtaaaactttttttatgagaccatcaaagagagaaagagaataaaaatatttttgtaaaactttttttatgagaccatcagaaagaggtttaatatttttgtgataccctgaaaggaaataggaataggaataggaatagtgtcataatcgtatcacactattgagacagaaaaagaagaagtcgcgagaggtaactttttgtgaatgtagttaagaacatttttgttttgcaaaccggaatatagtgtccggtacacttttttaattcgtggtgtgcctgaatcgttcgattaaccctactcatccaatttcagatgaatagagttatcgattcagacacacgctttgagttttgttgaatcgatgagtgaagtatcatcggttgcaccttcagatgccgatccgtcgacatacttgaatccatccttgacctcaagttcagatgattccttgcacatgtctccgatacgaacgctaaactctagattcttgacacattttgtatcgacgatcgttgaaccgatgatatcttcgtaactcactttcttatgagagatgttagacccgagtactggatgggtcttgatgtcgctgtctttctcttcttcgctacatctgatgtcgatagacacctcacagtctttgatcatagcaagagcttcttcatgagtgatcgcgggagagtccttaccttgtcctggggacacgctggacaatctagcattcactgtgtttccatcagcggattctgagatggatttaatctgaggacatttggtgaatccaaagttcattctcagacctccaccgatgatggagtaataagtggtaggaggatctacatcctcgactgatgtggaatcatcttctgattccacctcgggatttggatctgactcggactctgtaatttccgttacggattggcaaatcttatcattggtcggtgtttggtcttgctttgtgactttgataataacatcgattcccatatgatgtttgttttcttcttccgtacacgaggatgaggatgaggatgattgctgaagactggcaggcacatgcatgccaggacgatatattgtttcataattgctattgattgagtactgttctttatgattctacttccttaccatgcaataaattagaatatattttctacttttacgagaaattaattattgtatttattatttatgggtgaaaaacttactataaaaagcgggtgggtttggaattagtgatcagtttatgtatatcgcaactaccgggcatatggctatcgacatcgagaacattacccacatgataagagattgtatcagtttcgtagtcttgagtattggtattactatatagtatatagatgtcgacgctagatatacagtcgcccactagagttactgtctccgaatgcggcatgataccgtcatcattctttgctttcgttaactgtttggaggaagaatctttgttattgcatttaatctcgaaattcagagtgcacacctttctcctgtaaagaaacctgaagttgctaccttattaaggacagagaagtattcctcacgaaatacgggattacagtctttatgattcatagtaatagttagttccgacgttgagatggattcactgagaccggtagtggtcgtccgagtacacgacgtgtcgttgacgggatacagattaatttccacatcgatatagttaaaggtattactgggtacgggttcgcatttatctgcggaagagacggtgtgagaatatgttccgagaccacacggagaacagatgacgtctccggatactccgtatcctattccacattttgtttgggaaacacatgccttgcatccggatgatcctttgagaagacaataatatccgggagagcattcacagattctattgtgagtcgtgttacacgatcgcgtcttccgttacaacttagacaagcgggtaaatgattattgcgagatgtgaaggtacccgaaccacagggtgtacatcgtgtgttagtcttgctatcgcataatctggaagcgtatgttcccggacacaaattatggcgtttgtattcgttgtctttacactttccatcggatggtgcatgcggtgctatatctcttccgtttattattatacatgagagaaacaatatatacgagtataatacggacttcatgatttaataatgtagtaatcgtcgtcttgttcctgtttcctacttctccaatcatatagatattttctttctatcatggataatatttgtaatggttctttccgtacaacatactgtttagatgatattgcgcataatttccggaggcaaatacgatagtctagattgaccgatggtagactctaatttattgagtgctttgtcgacgagtttacttttatgctccatcgatagatggcactgttctatgagatcgtcgtacatgggaaatgaaatgtgtctgtccgaatgtatggctttaagatagctgtgataccgtatacaggtcggtgtcggagattcgaatctctttaaggcgacttatgtcacgatgatggaatctatcttatcgaatgatatatttttcataaatacacttttatagtcctcgtttaaacagaatttactatgtagttccgcgaatgactcgtcccttaataggcagtaggctagtatcttttttacgtagtaatcgtcgtagggagagaattctgacatcttgtagaacaacgatttaatcataggtagagatactttcagtctgtggtggatgatgtcattcacaacatccgccttgtatatgatgtttctgttttcaaacaccaagtcgaataccgtctttagtcggaaggttgatgtcgtatccgatgtatgaggcaacattgttgttacaattttgaaaggcggtattatagtattcgtctttctgaatgtcgaacctatctagtagataccgtagtatattgagagtgtatccttgattatgttttatgaatagataaagtagatgttgtccttcttccttttgttcgtgccaattgagtaacattatgagaatatgacctgttgcacaatcgttccatgatgggtgtacaatcaagattattacgtatcctcgtatcggctcctcgagataaaagagcatacaccacacgaggactatgtttggtatactgttgaaggtaagtgtgtaaccgcgttaatgtttgctccataatctattatcgcgtagatgaatcgcttctcggctcgcatcttagtgtgacttaacttgtaataattgcttttgtagaacgtggatatgtgtttacagtagtaatgaagagaagtgagtccatcctcgtcgacgcaattagggtcggatcctttgtacagaacgtaatagtttaagctcccattgaatttatatctaagataacacagcaatagatcggatgatttactaaagtcatcaatggtgtccgttagtatatcaaagatcttgttatcgattgatagtgaatgaatcagatagtggtgtagaggaatatgtcctttttcatccttgctatcaaagttacgcatgccgtggtgtaacaatatctttaatacagatggattaaatcgtgtattcatcgtatagcaatgtaatggagagttacctcgtttattcagatcgcagtgtttaataactagcttaaacagatgagacgatgtatccacatcaaagaacgtaaaatacatatgacaaacattgttgacagaaacgtgaccttcattcttaccgtcgtccataaatacgttaggtatgtaccacatactgtcgcgaacgatgcgtacaatctcgtccatctcataatgatttactttttcataattaaagatgtgaaagaaaaccgaacaatatatttttttagtaatgtttatgcgagacatataaaataaactccgtgtttatgatgccggtaaatgtttttatcatcttggacggaatcgattttgtaatatgtcatggaaacaaatgaaacaggacattatcgctccatgataaattatttaatggagtaataaagtatctccatgggtaatttcgaaatcaagttatcgtctgtattaatgttgtccactatggagtcgatcctctcattgttctttacagtttctgtaatgatggacgttagttcttttttgtaccatttgatgtcggattctttgcgtatctcaatctgtggcgtttgcttcgtttaaataatatatcaaacatggagacgcctgatatgtaggcattcttcattctattaatgtctactctatagcgctttagttccttatgacgaccggagatatcatacttactttagaaggaaaatcatcatctaggattaaggcgtatctgatacaggcgaataatggttcaggatatagatagcgtatatctctattaaatgcgtcaatcatagtctctagagtgggatggtagctaagtaataaatcaactatcctcgttttgttttctcttctgtaactacttttctggatggccgtattgattatcgagcgtgatgttgtaacactcgctccatattccaataaccgctttgcaaattgtatattattgacatcgaccgcgtaatatagtagagttttattctcattatcgatcatatctatattatccatgtacttgcttagtatatcaaatacatctattagtatggtttcataacagtgatacccgcaattattaaatctcgataatatcagaccgtacatacatagacggccattgttcgatacgtgatttacagccatgtgtccattattttccacgataaaccttacgacgtttacatcgacgagattattattaacaaagtagtcgtgcagaggatagttgttgtccgttatctaacatgcatcgaacgaccatatcgccgtaatgtaagtagtttatcaacatggcttgtacgatggattcatcctgttgtctaaatctctttagaatgttatcgatgatgtagtggttatagtctctggaatcgtaagaagtaatactacgcattacgtcgacaagagtatgacgtctctcaataagaagattaacgatttccatgtctacattatatggggttactctaaatcgcttgtttagataatccgcctctaatatagggctgacgtcgtatactctacacgtgtccacatcctttattaataatttaacaatctctatatctatggttgagcaagaccagtagtattggatgggtaaagatcctccttcgtctctgccatggatggaaacattgttattgatcaaacatttaattacatccttggatagagattgagattctctatgagacgatatatagtaatgaagagagttcttacacatatcactgtcgtacatacaggtacgaaatacgtaaccggtgctgtaacattctgatttaagaagccatagcaatacttctggtctcggattaggcgtcgttacgtatatatccaccaatccgagaccattgattgcataattcgtattcttggacggacgtatccgtttatccacaattaggtattttagcagacgtaagtcgatattatccgaagacatatacgaatacagatcgaaatcatttatattcgacttgagttcgttagaggaattcgaatagctggatatcagtagatgcacaatttgagattttacgtatctatgcttactgtatgctcctagcggagttaatccttcgttgtttctacaaagtctctcgactccgcgagagagtaacagtcgaacaatcttaatgtctgtatcgcatttattgaagacgtaacaatgtagcgcattgtttcctcgtctatctatatgttttgataagttgtgacacgtttcaatttctagttttatttttttgtacgtcacatcttcatccagtagacgacatagaatacatgtgcaatccatagctattctggtgctaattattcctatttcacgaaaaatgatgaaggcaatcattcctcataagatgataaaaagtgtagtgagagagcatgaaggagatttagtatttagcagtgcggatatgatccaagagggtgagatagtcgttctcgttcagaatctttcgcagcataagtagtatgtcgatatacttatcgttgaagactcttccagagacgatagctgattgagtacaaagtccaatgattgcacgaagttcttcggcggttttcatggagtcatttctgatgaaacatttaatgatctccacgcaattgtcgatattgtcccacggaagtgaatccttcaactcaccaccaaagagctccgttgcatcagttctgaaagagatgagaagcctgtagagagaccctgcgctttctctatgggtccatctatgagaaacccacaggatgtattcagtcagacaatgtctgacgtcggccacggtattcagggagtccttagtagcgtggcaatgacagggtctgaactgggcacaaggagaggccattgtaaaggtagacctgtagccgtttatgctaatagagggctttaatttccatttttttaatgggttgtggatgaggaatgagagtgatatcatattgagatacgtagttatgtagaggtgtatttcctatattatttactttcggtttcatattttaccaactctttaataaatttcttttcacgatgcatcttattaaatgacgttttctcataagtggacatatagatgcagaagtaatgaagaaaagtattacctctatcatctacataattagggtctgctcctttttttaacaacttatacagtacgtagtagtagtttatcggttttaaatcaagtctagaatatatagtggattaatatatttttatattagctaaagctatctatactatcagaaagcatatcattctcaacttcatcatgagttaaatatttgtgtaatggatgtcatgaacattaaacgtattcatgacatactcctttaataggttttttaaaacagatgattcaaatccttcattcattagataacagtgtaacggagtcgtaccttctactagtttgtttatatcacagcattctacaaacagtctaaacaatagagaagacggacagactttaacgtataaatgacacatgttatcgatattcgttgatgaattattattaaacgtagttatgataaatgattctaacgacatctctcgctagagataaaatctagtatcgtatcattaaacatctttgcatcatactcgcatagcatagtttttcataattaatacaatatttaaaagacttattcggaaagtattttaatacatgtatcatcgatggagatccatatgaggagtcacttgtagttcttcagtagtaataacagtgctatcatcgatagtataattatatgtagaaggttcatatgttgttgtaattggagtaactgttggtagttcttccgtggaatcaataattatactaacagcaatagtataattatataaatatgttccgttgatatcacatattttaatgaactcatttctaacaccctcagctatatctgtccaattaaatgtagccaacaatctactacgttctctttgattgactacttgtacggtagcgacgctacactatctttattgtcttctacatgctccaattgaatgtcatgatacaacgcagtttttcttatgcatgtttcataacaccacgaacatgtcgcagtaagatatatagccagagataatttctgtaaattcatgattgccggtcataaacaagcccgtcaataattgtggctatatattcagtttatagagcaaaataattaagcacaatagcgcttaatctcaaaatatgttatgtttatttttttcatattaaacatactggttaaaatcctctaaaggctgatcttcatctataaatcaagatcataattacatttagacagtggtttcatgtttataaaaatgttctttttgtgtgaataaggaatatactaatcaataatcaaccatcgaccccattacgatagtatgcaggcaaccccccattagagaggtacgtgtaatcagtctctccagttttagtatttttataagtcattgttacataaacggcttttaaacagtctcctcgataataagccatatctggaaatttattaaatactcgagtcattttacgcacggtcaaaaaagtaagtaatgtcgacgacttcttacattctatagaaacacctagaatactcattttcttttggaaaatatcctcagactctgatttgaacaatgcacgacctatagtaaaccgtgaccaataagttatattagtcaatggtatatccaaaccatcaggtgtggatagtacgccgatagtccagtctttggtatcgatagtgtagttattgaactgagaagttaccgtatagtctttttggtcatctctaaacaaggaaactaatacctctacactattgaacgatttatcttccgtaatgggtggaataacgggaatataaagtggactagcgatggatgaagtcacgaatataagacacgctattaatccgtatatcatcattttgatattacttataataacgatttgtttaatttttagtttatactattaattgtaaatgatattattatttttttaagtattatcagctttagtttatactattactatttgtaatatttagacatagataaacgtgataaaagtctatttgtttatatttattgcggatagcagtatttccctataaaaagtatacgtcctgtgttgtctttaatcatgtacatgaatggatggtttatgtagaccttcgtacgatataccatcgaaaagttagtcataaatactcctgtaacggccgatgcttctgtatactcctcattaacatctataaacgtcgtatgtagaaatttttctacagtgatagtttcattacacatcttgctaaaatctgcataatatccgaatatattagtaagtcctaaattttctaaaatcggtaccagattatacggttctgtcatttccactttaaactttggcatatacaagtctatacttttagtagataacataccacaccattttttaaatttttcatctgttatatttttttctatgttatatataccttctatgtcgtccggtagtataattaccatactagagtttccctcgtatggaatatcgataatagagaatcctccgaataattcattaatatgtacatattgcaagttattctcggtacccaccatcatatcaacactggtaactatattcttagaaatataaaacttgtctgtatatgtaagatgtttagaaaatggatatttccacattgctttaaaatggacggcgctaacaactgtcatacgagtattaatggatagcggactagtcaataaggaattaattttaccatttgtcatcgtcttaacccattcgttgattagttcctttgtttggttagcattattaaagtttacagtttgaaaatcgtcttttattttttgtaggaaggaggcgtggaactcgatactatcgctaccgtatattttatttgcggtagctagtgtcgcacaatacggaatatctacgtccatgtcattattgtcatccttcttatcatcgggtgtattctcattcatattctctatatattttgatagttgttcagctgtagaaccagctgctccatgatttagaatagataaagtagataaaatagaaactggagaaatcaaaacattttcatcagggtgttttaagattagttctttaaagatatccatggtatagaccaaacaataacgataacgatatatatcataaataaataatgttaaatttcagtttatgtttgtaccccgtattcatacttaacaaattggtattgcgtacacaatcaatcatattacataccattaataatgcaagcataaaaaatcgttagtagatgtttctaaatataggttccgtaagcaaagaatataagaatgaagcggtaatgataaaatcaatcgttatctaaaatgatcatactcatttattttattctattatattaacacatacatttttaacagcaacacattcaatattgtattgttatttttatattatttacacaattaacaatatattattagtttatattactgaattaataatataaaattcccaatcttgtcataaacacacactgagaaacagcataaacacaaaatccatcaaaaatgtcgatgaaatatctgatgttgttgttcgctgctatgataatcagatcattcgccgatagtggtaacgctatcgaaacgacattgccagaaattacaaacgctacaacagatattccagctatcagattatgcggtccagagggagatggatattgtttacacggtgactgtatccacgctagagatatcgacggtatgtattgtagatgctctcatggttatacaggcattagatgtcagcatgtagtattagtagactatcaacgttcagaaaaaccaaacactacaacgtcatatatcccatctcccggtattgtgcttgtattagtaggcattattattatgtgttgtctattatctgtttataggttcactcgaagaactaataaactacctctacaagatatggttgtgccataatttttataaatttttttatgagtatttttacaaaaaaaatgtataaagtgtatgtcttatgtatatttataaaaatgctaagtatgcgatgtatctatgttatttgtatttatctaaacaatacctctacctctagatattatacaaaaattttttatttcggcatattaaagtaaaatctagttaccttgaaaatgaatacagtgggtggttccgtatcaccagtaagaacataatagtcgaatacagtatccgattgagattttgcatacaatactagtctagaaagaaatttgtaatcattttctgtgacgggagtccatatatctgtatcatcgtctagtttatcagtgtcccatgctatatttctgttatcatcattagttaatgaaaataactctcgtgcttcagaaaagtcaaatattgtatccatacatacatctccaaaactatcgcttatacgtttatctttaacgatacctatacctagatggttatttactaacagacattttccagatctattgactataactcctatagtttccacatcaaccaagtaatgatcatctattgttatataacaataacataactcttttccatttttatcagtatgtatatctatatcaacgtcgtcgttgtagtgaatagtagtcattgatctattatatgaaacggatatgtctagaacggcaattgtcttacgtccagttaacactttcgttgatttaaagtctagagtctttgcaaacataatatccttatccgactttatatttcctgtagggtggtataattttattttgcctccacatatcggtgtttccaaatatattactagacaatattccatatagttattagttaagggtacccaattagaacacgtacgcttattatcatcatttggatcgtatttcataaaagttattgtactatcgatgtcaacacattctacattttttaatcgtctatatagtatttttctgatattttctataatatcagaattgtcttccatcggaagttgtatactatcggaatcagttacatgtttaaataattctctgatgtcattccttatacaatcaaattcattattaaacagtttaatagtctgtagacctttatcgtcgtaaatatccattgtcttattagttacgcttatttttatgtgttttacgttgctttattatattttataagaatgattgtttgacgaatcacgagaactattaagacacattattaggtatatattataaaaaagtttttgattacgatgttataagaggaaagaggacacattaacatcatacatcaattaactacattcttataacatcgtaatcaaaagaattgcaattttgatgtataacaactgtcaatgggttatggaattgtatattacatattatacggtatgttggtaacgacaaataccgatcggtaatcgtttgccggtgtaatagaattatatatatctatctattacaccggctgagtatacataataataagttgtggtagtatgatctccatatttataatttaggactttgtattcagtatttttggaatcataaaaaataaaaaaaagttttactaatttaaaatttaaaaagtatttacatttttttcactgtttagtcgcggatatggaattcgatcctgccaaaatcaatacatcatctatagatcatgtaacaatattacaatacatagatgaaccaaatgatataagactaacagtatgcattatccgaaatattaataacattacatattatatcaatatcacaaaaataaatacacatttggctaatcaatttcgggcttggaaaaaacgtatcgccggaagggactatatgactaacttatctagagatacaggaatacaacaatcaaaacttactgaaactatacgtaactgtcaaaaaaatagaaacatatatggtctatatatacactacaatttagttattaatgtggttattgattggataaccgatgtgattgttcaatcaatattaagagggttggtaaattggtacatagctaataatacctatactccaaatacacccaataatacaacaaccatttctgagttggatatcatcaaaatactaaataaatacgaggacgtgtatagagtaagtaaagaaaaagaatgtggaatttgctatgaagttgtttactcaaaacgattagaaaacgatagatactttggtttattggattcgtgtactcatatattttgcataacatgcatcaatatatggcataaaacacgaagagaaaccggtgcgtcggataattgtcctatatgtcgtacccgttttagaaacataacaatgagcaagttctataagctagttaactaataaataaaaagtttaatttgttgacgacgtatgtcgttattttttctcgtataaaagattaatttgattctaatataatctttagtattggataaatatcaattcaaattaattccattagattatatcataaataaaaatagtagcacgcactacttcagccaaatattcttttttgaaacgccatctatcgtagtgaggacacaagtgaacctataatgagcaaatttattagtatcggttacatgaaggactttacgtagagtggtgattccactatctgtggtacgaacggtttcatcttctttgatgccatcacccagatgttctataaacttggtatcctcgtccgatttcatatcctttgccaaccaatacatatagctaaactcaggcatatgttccacacatcctgaacaatgaaattctccagaagatgttacaatgtctagatttggacatttggtttcaaccgcgttaacatatgagtgaacacacccatacatgaaagcgatgagaaataggattttcatcttgccaaaatatcactagaaaaaatttatttatcaattttaaaggtataaaaaatacttattgttgctcgaatattttgtatttgatggtatacggaagattagaaatgtaggtattatcatcaactgattctatggttttatgtattctatcatgtttcactattgcgttggaaataatatcatatgcttccacatatattttattttgttttaactcataatactcacgtaattctggattattggcatatctgtgaataattttagctccatgatcagtaaatattaatgagaacatagtattaccacctaccattatttttttcatttcgttcaattcttgattgcaaagatctatataatcattatagcgttgacttatggactctggaatcttagacgatgtacagtcatctataatcatggcatatttaatacattgttttatagcatagtagttatctacgatgttagatatttctctcaatgaatcaatcacacaatctaatgtaggtttatgacataatagcattttcagcagttcaatgtttctagattcgttgatggcaatggctatacatgtatatccgttatttgatctaatgttgacatctgaaccggattctagcagtaaagatactagagattgtttattatatctaacagccttgtgaagaagtgtttctcctcgtttgtcaatcatgttaatgtctttaagataaggtaggcaaatgtttatagtactaagaattgggcaagcataagacatgtcacaaagaccctttttgtatgtataagtgtagaaattataacatccatagttggatttacataggtgtccaatcgggatctctccatcatcgagatgattgacggcatctcccccttccttttttagtagatatttcatcgtgtaagaatcaatattaatatttctaaagtatccgtgtatagcctctttatttaccacagctccatattccaacatgcattccactaaagggatatcgatatcgccgaatgtcatatactcaattagtatatgttggaggacatccgagttcattgttttcaatatcaaagagatggtttccttatcatttctccatagtggtacaatactacacattattccgtgaggctttccattctccaaaaacaatttgaccaaatctacatctttattgtatctataatcactatttagataatcagccataattcctcgagtgcaacatgttagatcgtctatatatgaataagccgtgttatctattcctttcattaacaatttaacgatgtctatatctatatgagatgacttaatataatattgaagagctgtacaatagtttttatctatagaagacggcttgattccgtgattaattagacatttaacaacttccggacgcacatatgctctcgtatccgactctgaatacagatgagagatgatatacagatgcaatacggtaccgcaatttcgtagttgataatcatcatacgcgtatccgtactcgtcctcataaagaacactgcagccattttctatgaacaaatcaataattttaggaacaggatcattgtcattacataattttctataactgaacgatggttttcacatttaacactcaagtcaaatccatgttctaccaacacctttatcaagtcaacgtctacatttttggatttcatatagctgaatatattaaagtcatttatgttgctaaatccagtggcttctagtagagccatcgctatatcctttaactttaacatgtctactatttgtgtattcttctaatggggtagctgtctccaatttttgcgtaatggattagtgccactgtctagtagtagtttgacgacctcgacattattacaatgctcattaaaaaggtatgcgtgtaaagcattattcttgaattggttcctggtatcattaggatctctgtctctcaacatctgtttaagttcatcgagagccacctcctcattttccaaatagtcaaacattttgactgaatagaagtgaatgagctactgtgaactctatacacccacacaactaatgtcattaaatattatttttttgaatgtatttataccatgtcaaaaacttgtacaattattaataaaaataatttagtgtttaaattttaccagttccagattttacacctccgttaaccccactttttacaccactggacgaccctcctccccacattccaccgccaccagatgtataagttttagatcctttattactaccatcatgtccatggataaagacactccacatgccgccactaccccctttagaagacatattaataagacttaagagttaaggacaagtttaacaataaaattaatcacgagtaccctactaccaacctacactattatatgattatagtttctatttttacagtaccttaactaaagtttctagtcacaagagcaatactaccaacctacactattatatgattatagtttctatttttataggaacgcgtacgagaaaatcaaatgtctaatttctaacggtagtgttgataaacgattatcgtcaatggatacctcctctatcatgtcgtctattttcttactttgttctattaacttattagcattatatattatttgattataaaacttatattgcttattagcccaatctgtaaatatcggattattaacatatcgtttctttgtaggtttatttaacttgtacatcactgtaagcatgtccgtaccatttattttaatttgacgcatatccgcaatttctttttcgcagtcggttataaattctatatatgatggatacatgctacatgtgtacttataatcgactaatatgaagtacttgatacatattttcagtaacgatttattattaccacctatgaataagtacctgtgatcgtctaggtaatcaactgttttcttaatacattcgatggttggtaatttactcagaataatttccaatatcttaatatataattctgctatttctggaatatatttatctgccagtataacacaaatagtaatacatgtaaacccatattttgttattatattaatgtctgcgccattatctattaaccattctactaggctgacactatgcgacttaatacaatgataaagtatactacatccatgtttatctattttgtttatatcatcaatatacggcttacaaagttttagtatcgataacacatccaactcacgcatagagaaggtagggaataatggcataatatttattaggttatcatcattgtcattatctacaactaagtttccattttttaaaatatactcgacaactttaggatctctattgccaaatttttgaaaatatttatttatatgcttaaatctatataatgtagctccttcatcaatcatacatttaataacattgatgtatactgtatgataagatacatattctaacaatagatcttgtatagaatctgtatatcttttaagaattgtggatattaggatattattacgtaaactattacacaattctaaaatataaaacgtatcacggtcgaataatagttgatcaactatataattatcgattttgtgatttttcttcctaaactgtttacgtaaatagttagatagaatattcattagttcatgaccactatagttactatcgaataacgcgtcaaatatttcccgtttaatatcgcatttgtcaagataataatagagtgtggtatgttcacgataagtataataacgcatctctttttcgtgtgaaattaaatagtttatcacgtccaaagatgtagcataaccatcttgtgacctagtaataatataataatagagaactgttttacccattctatcatcataatcagtggtgtagtcgtaatcgtaatcgtctaattcatcatcccaattataatattcaccagcacgtctaatctgttctattttgatcttgtatccatactgtatgttgctacatgtaggtattcctttatccaataatagtttaaacacatctacattgggatttgatgttgtagcgtatttctctacaatattaataccatttttgatactatttatttctatacctttcgaaattagtaatttcaataagtctatatcgatgttatcagaacatagatattcgaatatatcaaaatcattgatatttttatagtcgactgacgacaataacaaaatcacaacatcgtttttgatattattatttttcttggtaacgtatgcctttaatggagtttcaccatcatactcatataatggatttgcaccactttctatcaatgattgtgcactgctggcatcgatgttaaatgttttacaactatcatagagtatcttatcgttaaccatgattggttgttgatgctatcgcattttttggtttctttcatttcagttatgtatggatttagcacgtttgggaagcataagctcatatgatttcagtactgtagtgtcagtactattagtttcgatcagatcaatgtctagatctatagaatcaaaacacgataggtcagaagataatgaatatctgtaggcttcttgttgtactgtaacttctcgttttgttagatggttgcatcgtgctttaacatcaatggtacaaattttatcctcgctttgtgtatcatattcgtccctactataaaattgtatattcagattatcatgagatgtgtatacgctaacggtatcaataaacggagcacaccatttagtcataaccgtaatccaaaaatttttaaagtatatcttaacgaaagaagttgtgtcattgtctacggtgtatggtactagatcctcataagtgtatatatctagagtaatgtttaatttatcaaatggttgataatatggatcctcatggcaatttcctaagacgaaaataagacataaacacgcaataaatctaattgcggacatggttactccttaaaaaaatactaataatcaccttggctatttagtaagtgtcatttaacactatactcatattaatccatggactcataatctctatacgggattaacggatgttctatatacggggatgagtagttctcttctttaactttatactttttactaatcatatttagactgatgtatgggtaatagtgtttgaagagctcgttctcatcatcagaataaatcaatatctctgtttttttgttatacagatgtattacagcctcatatattacgtaatagaacgtgtcatctaccttattaactttcaccgcatagttgtttgcaaatacggttaatcctttgacctcgtcgatttccgaccaatctgggcgtataatgaatctaaactttaatttcttgtaatcattcgaaataatttttagtttgcatccgtagttatcccctttatgtaactgtaaatttctcaacgcgatatctccattaataatgatgtcgaattcgtgctgtatacccatactgaatggatgaacgaataccgacggcgttaatagtaatttactttttcatctttacatattgggtactagttttactatcataagtttataaattccacaagctactatggaataagccaaccatcttagtataacacacatgtcttaaagtttattaattaattacatgttgttttatatatcgctacgaatttaaacagagaaatcagtttaggaaaaaaaattatctatctacatcatcacgtctctgtattctacgatagagtgctactttaagatgagacatatccgtgtcatcaaaaatatactccattaaaatgattattccggcagcgaacttgatattggatatatcacaacctttgttaatatctacgacaatagacagcagtcccatggttccataaacagtgagtttatctttctttgaagagatattttgtagagatcttataaaactgtcgaatgacatcgcatttatatctttagctaaatcgtatatgttaccatcgtaatatctaaccgcgtctatcttaaacgtttccatcgctttaaagacgtttccgatagatggtctcatttcatcagtcatactgagccaacaaatataatcgtgtataacatctttgatagaatcagactctaaagaaaacgaatcggctttattatacgcattcatgataaacttaatgaaaaatgtttttcgttgtttaagttggatgaatagtatgtcttaataattgttattatttcattaattaatatttagtaacgagtacactctataaaaacgagaatgacataactaatcataactagttatcaaagtgtctaggacgcgtaattttcatatggtatagatcctgtaagcattgtctgtattctggagctattttctctatcgcattagtgagttcagaatatgttataaatttaaatcgaataacgaacataactttagtaaagtcgtctatattaactcttttattttctagccatcgtaataccatgtttaagatagtatattctctagttactacgatctcatcgttgtctagaatatcacatactgaatctacatccaattttagaaattggtctgtgttacatatctcttctatattattgttgatgtattgtcgtagaaaactattacgtagaccattttctttataaaacgaatatatagtactccaattatctttaccgatatatttgcacacataatccattctctcaatcactacatctttaagattttcgttgttaagatatttggctaaactatataattctattagatcatcaacagaatcagtatatatttttctagatccaaagacgaactctttggcgtcctctataatattcccagaaaagatattttcgtgttttagtttatcgagatctgatctgttcatatacgccatgattgtacggtacgttatgataaccgcataaaataaaaatccattttcatttttaaccaatactattcataattgagattgatgtaatactttgttactttgaacgtaaagacagtacacggatccgtatctccaacaagcacgtagtaatcaaatttggtgttgttaaacttcgcaatatttatcaatttagatagaaacttatactcatcatctgttttaggaatccatgtattattaccactttccaacttatcattatcccaggctatgtttcgtccatcatcgttgcgcagagtgaataattcttttgtattcggtagttcaaatatataatccatgcatagatcggtaaagctattgtagatgtgatttttcctaaatctaatataaaactcgtttactagcaaacactttcctgatttatcgaccaagacacatatggtttctaaatctatcaagtggtggggatccatagttatgacgcagtaacatagattattaccttcttaactgtcgctaatatctatatatttattgttatcgtattggattctgcatatagatggcttgtatgtcaaagatatagaacacataaccaatttatagtcgcgctttacattctcgaatctaaagttaagagatttagaaaacattatatcctcggatgatgttatcactgtttctggagtaggatatattaaagtctttacagatttcgtccgattcaaataaatcactaaataatatcccacattatcatctgttagagtagtatcattaaatctattatattttatgaaagatatatcactgctcacctctatatttcgtacatttttaaactgtttgtataatatctctctgatacaatcagatatatctattgtgtcggtagacgataccgttacatttgaattaatggtgttccattttacaacttttaacaagttgaccaattcatttctaatagtatcaaacgctccatgattaaatattttaatagtatccattttatatcactacggacacaaagtagctgacataaaccattgtataatttttatgttttatgtttattagcgtacacattttggaagttccggcttccatgtatttcctggagagcaagtagatgatgaggaaccagataggttatatccgtacttgcacttaaagtttacattgtcgttgtatgagtatgatcttttaaacccgctagacaagtatccgtttgatattgtaggatgtggacatttaacaatctgacacgtgggtggatcggaccattctcctcctgaacacaggacaccagagttaccaatcaacgaatatccactattgcaactataagttacaacgcttccatcggtataaaaatcctcgtatccgttatgtcttccgttggatatagatggaggggattggcatttaacagattcacaaataggtgcctcgggattccataccatagatccagtagatcctaattcacaatacgatttagattcaccgatcaaatgatatccgctattacaagagtacgttatactagagccaaagtctactccgccaatatcaagttggccattatcgatatctcgaggcgatgggcatctccgtttaatacattgattaaagagtgtccatccagtacctgtacatttagcatatataggtcccattttttgctttctgtatccaggtagacatagatattctatagtgtctcctatgttgtaattagcattagcatcagtctccacactattcttaaatttcatattaatgggtcgtgacggaatagtacagcatgatagaacgcatcctattcccaacaatgtcaggaacgtcacgctctccaccttcatatttatttatccgtaaaaatgttatcctggacatcgtacaaataataaaaagcccatatatgttcgctattgtagaaattgtttttcacagttgctcaaaaacgatggcagtgacttatgagttacgttacactttggagtctcatctttagtaaacatatcataatattcgatattacgagttgacatatcgaacaaattccaagtatttgattttggataatattcgtattttgcatctgctataattaagatataatcaccgcaagaacacacgaacatctttcctacatggttaaagtacatgtacaattctatccatttgtcttccttaactatatatttgtatagataattacgagtctcgtgagtaattccagtaattacatagatgtcgccgtcgtactctacagcataaactatactatgatgtctaggcatgggagacttttttatccaacgatttttagtgaaacattccacatcgtttaatactacatatttttcatacgtggtataaactccacccattacatatatatcatcgtttacgaataccgacgcgcctgaatatctaggagtaattaagtttggaagtcttatccatttcgaagtgccgtgtttcaaatattctgccacacccgttgaaatagaaaattctaatcctcctattacatataactttccattgttaacacaagtactaacttctgattttaacgacgacatattagtaaccgttttccattttttcgtttcaagatctacccgcgatacggaataaacatgtctattgttaatcatgccgccaataatgtatagacaattatgtaaaacatttgcattatagaattgtctatctgtattaccgactatcgtccaatattctgttctaggagagtaatgggttattgtggatatataatcagagtttttaatgactactatattatgttttataccatttcgtgtcactggctttgtagatttggatatagttaatcccaacaatgatatagcattgcgcatagtattagtcataaacttgggatgtaaaatgttgatgatatctacatcgtttggatttttatgtatccactttaataatatcatagctgtaacatcctcatgatttacgttaacgtcttcgtgggataagatagttgtcagttcatcctttgataattttccaaattctggatcggatgtcaccgcagtaatattgttgattatttctgacatcgacgcattatatagttttttaattccatatcttttagaaaagttaaacatccttatacaatttgtggaattaatattatgaatcatagtttttacacatagatctactacaggcggaacatcaattattatggcagcaactagtatcatttctacattgtttatggtgatgtttatcttcttccagcgcatatagtctaatagcgattcaaacgcgtgatagtttataccattcaatataatcgcttcatcctttagatggtgatcctgaatgcgtttaaaaaaattatacggagatgccgtaataatttccttattcacttgtataatttccccattgatagaaaatatcacgctttccattcttgaagtactataagtaattatagtataatgtaaaggtttatatattcaatattttttataaaaaaatcatttcgacattaattcctttttaaatttccgtctatcatctatagaaacatattctatgaatttataaaatgcttttacgtgtcctatcgtaggcgatagaaccgctaaaaagcctattgaatttctacaaaagaatctattatatggtatagggagagtataaaacattaaatgcccgtacttattaaagtattcagtagccaatcctaactctttcgaatacttattaatggctcttgttctgtacgaatctatttttttgaacaacggacctagtggtatatcttgttctatgtatctaaaataatgtctgactagatccgttagtttaatatcctcagtcatcttgtctagaatggcaaatctaactgcgggtttaggctttagtttagtttttatatctacatctatgtctttatctaacaccaaaaatataatagctaatattttattacaatcatccggatattcttctacgatctcactaactaatgtttctttggttatactagtatagtcactatcggacaaataaagaaaatcagatgatcgatgaataatacatttaaattcatcatctgtaagatttttgagatgtctcattaaaatattattagggtcagtactcattatcattaggcagctattacttattttattatttttcaccatatagatcaatcattagatcatcaaaatatgtttcaatcatcctaaagagtatggtgaatgactcttcccatctaatttctgaacgttcaccaatgtctctagccactttggcactaatagcgatcattcgcttagcgtcttctatattattaactggttgattcaatctatctagcaatggaccgtcggacagcgtcattctcatgttcttaatcaatgtacatacatcgccgtcatctaccaattcatccaacaacataagctttttaaaatcatcattataataggtttgatcgttgtcatttctccaaagaatatatctaataagtagagtcctcatgcttagtaatttaactattttagttaacaactattttttatgttaaatcaattagtacaccgctatgtttaatacttattcatattttagtttttaggattgagaatcaatacaaaaattaatgcatcattaattttagaaatacttagtttccacgtagttaatgaaacatttgaactcatcgtacaagacgttctcgtacaggacgtaactataaaccggtttatatttgttcaagatagatacaaatccgataactttttttacgaattctacgggatccactttaaaagtgtcataccgggttctttttatttttttaaacagatcaatggtgtgatgttgattaggtcttttacgaatttgatatagaatagcgtttacatattctccataatggtcaatcgccatttgttcgtatgtcataaattctttaattatatgacactgtgtattgtttagttcatccttgttcattgttaggaatctatccaaaatggcaattatactagaactataggtgcgttgtatacacatattgatgtgtctgtttatacaatccatgatatttggatccatgctactaccttcgggtaaaattgtagcatcatataccatttctagtactttaggttcattattatccattgcagaggacgtcatgatcgcatcctaaaaaaatatattatttttatgttattttgttaaaaataatcatcgaatacttcgtaagatactccttcatgaacataatcagttacaaaacgtttatatgaagtaaagtatctacgatttttacaaaagtccggatgcataagtacaaagtacgcgataaacggaataataatagatttatctagtctatctttttctatagctttcatagttagatacatggtctcagaagtaggattatgtaacatcagcttcgataaaatgactgggttatttagtcttacacattcgctcatacatgtatgaccgttaactacagagtctacactaaaatgattgaacaatagatagtctaccattgtttcgtattcagatagtacagcgtagtacatggcatcttcacaaattatatcattgtctaatagatatttgacgcatcttatggatcccacttcaacagccatcttaaaatcggtaaaatcatattgctttcctttatcattaataatttctaaaacatcatctctatcataaaagatacaaatattaactgtttgatccgtaataacattgctagtcgatagcaatttgttaataagatgcgctgggctcaatgtcttaataagaagtgtaagaggactatctccgaatttgttttgtttattaacatccgttgatggaagtaaaagatctataatgtctacattcttgactgttttagagcatacaatatggagaggtgtatttccatcatgatctggttttgagggactaattcctagtttcatcatccatgagattgtagaagcttttggattgtctgacataagatgtctatgaatatgatttttgccaaatttatccactatcctggcttcgaatccgatggacattatttttttaaacactctttctgaaggatctgtacacgccaacaacggaccacatccttcttcatcaaccgagttgttaatcttggctccatactgtaccaataaatttattctctctatgacttcatcatctgttcccgagagataatatagaggcgttttatgctgtttatcacacgcgtttggatctgcgccgtgcgtcagcagcatcgcgactattctattattattaattttagaagctatatgcaatggataatttccatcatcatccgtctcatttggagagtatcctctatgaagaagttcttcgacaaatcgttcatctagtcctttaattccacaatacgcatgtagaatgtgataattatttccagaaggttcgatagcttgtagcatattcctaaatacatctaaatttttactattatatttggcataaagagatagataatactcggccgacataatgttgtccattgtagtataaaaattaatatttctatttctatttctgtatatttgcaacaatttactctctataacaaatatcataacttagttcttttatgtcaagaaggcactggtttagttcatctataaatgtcacgccataactaccacgcatgctatactcagaattatgataaagatatttatccttggggtgtaggtaatggggattaatctttgttggatcagtctctaagttaacacatgtcacacatgatccatttatagttatatcacacgatgatgatttatgaattgattccggaagatcgctatcgtattttgtggttccacaattcatttccatacatgttattgtcacactaatattatgatgaactttatctagccgctgagtggtaaacaacagaacagatagtttattatctttaccaacaccctcagccgctgccacaaatctctgatccgtatccatgatggtcatgtttatttctagtccgtatccagtcaacactatgttagcatttctgtcgatatagctttcactcatatgacactcaccaataatagtagaattaatgtcgtaatttacaccaatagtgagttcggcggcaaagtaccaataccggtaatcttgtcgaggaggacatatagtattcttgtattctaccgaatacccgagagatgcgatacaaaagagcaagactaatttgtaaaccatcttactcaaaatatgtaacaatagtacgatgcaatgagtaagacaataggaaatctatcttatatacacataattattctatcaattttaccaattagttagtgtaatgttaacaaaaatgtgggagaatctaattagtttttctttacacaattgacgtacatgagtctgagttccttgtttttgctaattatttcatccaatttattattcttgactatatcgagatcttttgtataggagtcagacttgtattcaacatgcttttctataatcattttagctatttcggcatcatccaatagtacattttccagattagcagaatagatattaatgtcgtatttgaacagagcctgtaacatctcaatgtctttattatctatagccaatttaatgtccggaatgaagagaagggaattattggtgtttgtcgacgtcatatagtcgagcaagagaatcatcatatccacgtgtccattttttatagtggtgtgaatacaactaaggagaatagccagatcaaaagtagatggtatttctgaaagaaagtatgatacaatacttacatcattaagcatgacggcatgataaaatgaagttttccatccagttttcccatagaacatcagtctccaatttttcttaacaaacagttttaccgtttgcatgttaccactatcaaccgcataatacaatgcagtgtttcccttgtcatcaaattgtgaatcatccagtccactgaatagcaaaatctttactattttggtatcttccaatgtggctgcctgatgtaatggaaattcattctctagaagatttttcaatgctccagcgttcaacaacgtacatactagacgcacgttattatcagctattgcataatacaaggcactatgtccatggacatccgccttaaatgtatctttactagagagaaagcttttcagctgcttagacttccaagtattaattcgtgacagatccatgtctgaaacgagacgctaattagtgtatattttttcattttttataattttgtcatattgcaccagaattaataatatctctaatagatctgattagtagatacatggctatcgcaaaacaacatatacacatttaataaaaataatatttattaagaaaattcagatttcacgtacccatcaatataaataaaataatgattccttacaccgtacccatattaaggagattccaccttacccataaacaatataaatccagtaatatcatgtctaatgatgaacacaaatggtgtattaaattccagtttttcaggagatgatctcgccgtagctaccataatagtagatgcctctgctacagttccttgttcgtcgacatctatctttgcattctgaaacattttataaatatataatgggtccctagtcatatgtttaaacgacgcattatctggattaaacatactaggagccatcatttcggctatcgacttaatatccctcttattttcgatagaaaatttagggagtttaagattgtacactttattccctaattgaaacgaccaatagtctaattttgcagccgtaatagaatctgtgaaatgggtcatattatcacctattgccaggtacatactaatattagcatccttatacggaaggcgtaccatgtcatattctttgtcatcgattgtgattgtatttccttgcaatttagtaactacgttcatcatgggaaccgttttcgtaccgtacttattagtaaaactagcattgcgtgttttagtgatatcaaacggatattgccatgtacctttaaaatatatagtattaatgattgcccatagagtattattgtcgagcatattagaatctactacattagacataccggatctacgttctactatagaattaattttattaaccgcatctcgtctaaagtttaatctatataggccgaatctatgatattgttgataatacgacggtttaatacacacagtattatctacgaaactttgataagttagatcagtgtacgtatatttagatgttttcagcttagctaatcctgatattaattctgtaaatgctggacccagatctctttttctcaaatccatagtcttcaataattctattctagtattacctgatgcaggcaatagcgacataaacatagaaaacgaatagccaaacggcgagaagacaatattatcatcttgaatatttttatacgctactataccggcattggtaaatccttgcagacgataggtagacgctgaacacgttaacgatagtatcaataacgcaatcatgattttatggtattaataattaaccttatttttatgttcggtataaaaaaattattgatgtctacacatccttttgtaattgacatctatatatccttttgtataatcaactctaatcactttaacttttacagttttccctaccagtttatccctatattcaacatatctatccatatgcatcttaacactctctgccaagatagcttcagagtgaggatagtcaaaaagataaatatatagagcataatccttctcgtatactctgccctttattacatcgcccgcattgggcaacgaataacaaaatgcaagcatcttgttaacgggctcgtaaattgggataaaaattatgtttttatatctattttattcaagagaatattcaggaatttctttttccggttgtatctcgtcgcagtatatatcatttgtacattgtttcatattttttaatagtttacaccttttagtaggactagtatcgtacaattcatagctgtattttgaattccaatcacgcataaaaatatcttccaattgttgacgaagacctaatccatcatccggtgtaatattaatagatgctccacatgtatccgtaaagtaatttcctgtccaatttgaggtacctatataggccgttttatcggttaccatatatttggcatggtttaccctagaatacggaatgggaggatcagcatctggtacaataaatagctttacttctatatctatgtttttagattttagcatagcgatagatcttaaaaagtttctcatgataaacgaagatcgttgccagcaactaatcaatagcttaacggatacttgtctgtctatagcggatcttcttaattcatcttctatataaggccaaaacaaaattttacccgccttcgaataaataatagggataaagttcataacagatacataaacgaatttactcgcatttctaatacatgacaataaagcggttaaatcattggttctttccatagtacatagttgttgcggcgcagaagcaataaatacagagtgtggaacaccacttacgttaatactaagaggatgatctgtattataatacgacggataaaagtttttccaattatatggtagattgttaactccaagataccagtatacctcaaaaatttgagtgagatccgctgccaagttcctattattgaagatcgcaatacccaattctttgacctgagttagtgatctccaatccatgttagcgcttcctaaataaatatgtgtattatcagatatccaaaattttgtatgaagaactcctcctaggatatttgtaatatctatgtatcgtacttcaactccggccatttgtagtctttcaacatcctttaatggtttgttagatttattgacggctactctaactcttactcctcttttgggtaattgtacaatctcgtttaatattatcgtgccgaaattcgtacccacttcatccgataaactccaataaaaagatgatatatctagtgtttttgtggtattggatagaatttccctccacatgttaaatgtagacaaatatactttatcaaattgcatacctataggaatagtctctgtaatcactgcgattgtattatccggattcattttatttgttaaaaaataatcctatatcacttcactctattaaaaatccaagtttctatttctttcatgactgattttttaacttcatccgtttccttatgaagatgatgtttggcaccttcataaatttttatttctctattacaatttgcatgttgcatgaaataatatgcacctaaaacatcgctaatctcattgtttgttccctggagtatgagagtcgggggggtgttaatcttggaaattatttttctaaccttgttggtagccttcaagacctgactagcaaatccagccttaattttttcatgattgattaatgggtcgtattggtatttataaactttatccatatctctagatactgattctggacatagctttccgactggcgcatttggtgtgatggttcccataagtttggcagctagcagattcagttttgaaacagcatctgcattaactagaggagacattagaatcattgctgtaaacaagtttggattatcgtaagaggctagtatagaaattgttgctcccatggaatgacccaataagtagatttaatagttaccacgtgctgtaccaaagtcatcaatcatcattttttcaccattacttcttccatgtccaatatgatcatgtgagaatactaaaattcctaacgatgatatgttttcagctagttcgtcataacgtccagaatgtttaccagctccatgacttatgaatactaatgccttaggatatgtaataggtttccaatatttacaatatatgtaatcattgtccagattgaacatacagtttgcactcatgattcacgttatataactatcaatattaacagttcgtttgatgatcatattatttttatgttttattgataattgtaaaaacatacaattaaatcaatatagaggaaggagacggatactgtcttttgtgagatagtcatggcgactaaatcagattatgaggatgctgttttttactttgtggatgatgataaaatatgtagtcgcgactccatcatcgatctaatagatgaatatatcacgtggagaaatcatgttatagtgtttaacaaagatattaccagttgtggaagactgtacaaggaattgatgaagttcgatgatgccgctatacagtactatggtattgataaaattaatgagattgtcgaagctatgagcgaaggagaccactacatcaattttacaaaagtccatgatcaggaaagtttattcgctaccataggaatatgtgctaaaatcactgaacattggggatacaaaaagatttcagaatctagattccaatcattgggaaacattacagatctgatgaccgacgataatataaacatcttgatactttttctagaaaaaaaattgaattgatgatataggggtcttcataacgcataattattacgttagcattctatatccgtgttaaaaaaaattatcctatcatgtatttgagagttttatatgtagcaaacatgatagctgtgatgccaataagctttagatattcacgcgtgctagtgttagggatggtattatctggtggtgaaatgtccgttatataatctacaaaacaatcatcgcatatagtatgcgatagtagagtaaacatttttatcgtttctactgggttcatacatcgtctacccaattcggttatgaatgaaattgtcgccaatcttacacccaaacccttgttatccattagcatagtattaacttcgttatttatgtcataaactgtaaatgattctgtagatgccatatcatacatgatattcatgtccctattataatcattactaactttatcacaatatatgttgataatatctatatatgatctagtctttgtgggcaactgtctatacaagtcgtctaaacgttgtttactcatatagtatcgaacagccatcattacatggtcccgttccgttgatagataatcgagtatgttagtggacttgtcaaatctatataccatattttctggaagtggatatacatagtcgtgatcaacattattgctagcctcatcttctatatcctgtactataccattatctatatcatctacataatctacgatattattatacataaacatcgacaacatactattgtcaattatctaagtcctgttgatccaaacccttgatctcctctatctgtactatctagagattgtacttcttccagttctggataatatatacgttgatagattagctgggctattctatcccccgtatttacattaaacgtacattttccattattaataagaataactcctatgtttcccctataatcttcgtctattacaccgcctcctatatcaatgccttttagggacagaccagacctaggagctattctaccatagcagaacttaggcatggacatactaatatctgtcttaattaactgtcgttctccaggagggatagtataatcgtaagcgctatataaatcatatccggcggcgtaaggtgattgcctagtaggagatttagctctgttagtttccttaacaaatctaactggtgagttaatattcatgttgaacataaaactaatattttatttcaaaattatttaccatcccatatattccatgaataagtgtgatgattgtacacttctatagtatctatatacgattcacgataaaatcctcctatcaatagcagtttattatccactatgatcaattctggattatccctcggataaataggatcatctatcagagtccatgtattgctggattcacaataaaattccgcatttctaccaaccaagaataaccttctaccgaacactaacgcgcatgatttataatgaggataataagtggatggtccaaactgccactgatcatgattgggtagcaaatattctgtagttgtatcagtttcagaatgtcctcccattacgtatataacattgtttatagatgccactgctggattacatctaggtttcagaagactcggcatattaacccaagcagcatccccgtggaaccaacgctcaacagatgtgggatttggtagacctcctactacgtataatttattgttagcgggtatcccgctagcatacagtctggggctattcatcggaggaattggaatccaattgtttgatatataatttacagctatagcattgttatgtatttcattgttcatccatccaccgatgagatatactacttctccaacatgagtacttgtacacatatggaatatatctataatttgatccatgttcataggatactctatgaatggatacttgtatgatttgcgtggttgtttatcacaatgaaatattttggtacagtctagtatccattttacattatttatacctctgggagaaagataatttgacctgattacatttttgataaggagtagcagatttcctaatttatttcttcgctttatataccacttaatgacaaaatcaactacataatcctcatctggaacatttagttcatcgctttctagaataagtttcatagatagataatcaaaattgtctatgatgtcatcttccagttccaaaaagtgtttggcaataaagtttttagtatgacataagagattggatagtccgtattctatacccatcatgtaacactcgacacaatattcctttctaaaatctcgtaagataaagtttatacaagtgtagatgataaattctacagaggttaatatagaagcacgtaataaattgacgacgttatgactatctatatatacctttccagtatatgagtaaataactatagaagttaaactgtgaatgtcaaggtctagacaaacccttgtaactggatctttatttttcgtgtatttttgacgtaaatgtgtgcgaaagtaaggagataactttttcaatatcgtagaattgactattatattgccacctatagcatcaataattgttttgaatttcttagtcatagacaatgctaatatattcttacagtacacagtattaacaaatatcggcatttatgtttctttaaaagtcaacatctagagaaaaatgattatctttttgagacataactcccattttttggtattcacccacacgtttttcgaaaaaattagtttttccttccaatgatatattttccatgaaatcaaacggattggtaacattataaatttttttaaatcccaattcagaaatcaatctatccgcgacgaattctatatatgttttcatcatttcacaattcattcctataagtttaactggaagagccgcagtaagaaattcttgttcaatggatactgcatctgttataatagatctaacggtttcttcactcggtggatacaataaatgtttaaacatcaaacatgcgaagtcgcagtgtagaccctcgtctctactaattagttcgttggaaaacgtgagtccgggcattaggccacgctttttaagccaaaatatggaagcgaatgatccggaaaagaagattccttctactgcagcaaaggcaataagtctctctccataaccggcgctgtcatgtatccacttttgagcccaatcggccttcttttttacacaaggcattgtttctatggcattaaagagatagtttttttcattactatctttaacataagtatcgatcaaaagactatacatttccgaatgaatgttttcaatggccatctgaaatccgtagaaacatctagcctcggtaatctgtacttctgtacaaaatcgttccgccaaattttcattcactattccgtcactggctgcaaaaaacgccaatacatgttttataaaatatttttcgtctggtgttagtttattccaatcattgatatctttagatatatctacttcttccactgtccaaaatgatgcctctgcctttttatacatgttccagatgtcatgatattggattgggaaaataacaaatctatttggatttggtgcaaggatgggttccataactaaattaacaatatcaataaattttttttcagttatctatatgcctgtacttggattttttgtacatcgatatcgccgcaatcactacaataattacaagtattattgatagcattgttattagtactatcataattaaattatcgacattcatgggtgctgaataatcgttattatcatcattatcattttgtaattgtgacatcatactaaataaatcgtttgcgagattgttgtgggaagcgggcatggaggatgcattatcattattatttaacgccttccatttggattcacaaatatggcgcgcgttcaacattttatggaaactataattttgtgaaaacagataacaagaaaactcgtcatcgttcaaatttttaacgatagtaaaccgattaaacgtcgagctaatttctaacgctagcgactctgttggatatgggtttccagatatatatcttttcagttcccctacgtatctataatcatctgtaggaaatggaagatatttccatttatctactgttcctaatatcatatgtggtggtgtagtagaaccattaagcgcgaaagatgttatttcgcatcgtattttaacttcgcaataatttctggttagataacgcactctaccagtcaagtcaatgatattagcctttacagatatattcatagtagtcgtaacgatgactccatcttttagatgcgatactcctttgtatgtaccagaatcttcgtacctcaaactcgatatatttaaacaagttaatgagatattaacgcgttttatgaatgatgatatataaccagaagttttatcctcggtggctagcgctataaccttatcattataataccaactagtgtgattaatatgtgacacgtcagtgtgggtacaaatatgtacattatcgtctacgtcgtattcgatacatccgcatacagccaacaaatataaaatgacaaatactctaacgccgttcgtacccatcttgatgcggtttaataaatgttttgatttcaatttattgtaaaaaaagattcggttttatactgttcgatattctcattgcttatattctcatctatcatctccacacagtcaaatccgtggttagcatgcacctcatcaaccggtaaaagactatcggactcttctatcattataactctagaatatttaatttggtcattattaatcaagtcaattatcttatttttaacaaacgtgagtattttactcattttttataaaaacttttagaaatatacagactctatcgtgtgtctatatcttctttttatatccaatgtatttatgtctgatttttcttcatttatcatatataatggtccaaattctacacgtgcttcggattcatccagatcattaaggttcttataattgtaacatccttctcttccctcttctacatcttccttcttattcttattcttagcgtcacagaatctaccacagcaggatcccatgacgagcgtcatattaaactaatccattttcaattataatatatgattagtaatgaccattaaaataaaaaatattcttcataaccggcaagaaagtgaaaagttcacattgaaactatgtcagtagtatacatcatgaaatgatgatatatatatactctattttggtggaggattatatgatataattcgtggataatcattcttaagacacatttcttcattcgtaaatcttttcacgttaaatgagtgtccatattttgcaatttcttcatatgatggcggtgtacgtggacgaggctgctcctgttcttgttgtggtcgccgactgtcgtgtttgcgtttatccctccattatcgcgattgcgtagatggagtactattatataccttgtaattaaatttttttattaattaaacgtataaaaacgttccgtatctgtatttaagagccagatttcgtctaatagaacaaatagctacagtaaaaataactagaataattgctacacccactagaaaccacggatcgtaatacggcaatcggttttcgataataggtggaacgtatattttatttaaggacttaacaattgtctgtaaaccacaatttgcttccgcggatcctgtattaactatctgtaaaagcatatgttggccgggcggagccgaacattctccgatatccaatttctgtatatctataatattattaacctccgcatacgcattacagttcttttctagcttggataccgcactaggtacatcgtctagatctattcctatttcctcagcgatagctcttctatccttttccggaagcaatgaaatcacttcaataaatgattcaaccatgagtgtgaaactaagtcgagaattactcatgcatttgttagttattcggagcgcgcaatttttaaactgtcctataacctctcctatatgaatagcacaagtgacattagtagggatagaatgttgagctaatttttgtaaataactatctataaaaagattatacaaagttttaaactctttagtttccgccatttatccagtctgagaaaatgtctctcataataaatttttccaagaaactaattgggtgaagaatggaaacctttaatctatatttatcacagtctgttttggtacacatgatgaattcttctaatgccgtactaaattcgatatctttttcgatttctggatatgtttttaataaagtatgaacaaagaaatggaaatcgtaataccagttatgtttaactttgaaattgttttttattttcttgttaatgattccagccacttgggaaaagtcaaagtcgtttaatgccgatttaatacgttcattaaaaacaaactttttatcctttagatgaattattattggttcattggaatcaaaaagtaagatattatcgggtttaagatctgcgtgtaaaaagttgtcgcagcatggtagttcgtagattttaatgtataacagagccatctgtaaaaagataaactttatgtattgtaccaaagatttaaatcctaatttgatagctaactcggtatctactttatctgccgaatacagtgctaggggaaaaattataatgtttcctctttcgtattcgtagttagttctcttttcatgttcgaaaaagtgaaacatgcggttaaaatagtttataacattaatattactgttaataactgccgggtaaaagtgggatagtaatttcacgaatttgatactgtcctttctctcgttaaacgcctttagaaaaactttagaagaatatctcaatgatagttcctgaccatccatagtttgtatcaataatagcaacatatgaagaacacgtttatacagagtatgtaaaaatgttaatttatagtttaatcccatggcccacgcacacacgattaattttttttcatctccctttagattgttgtatagaaatttgggtactgtgaactccgccgtagtttccatgggactatataattttgtggcctcgaatacaaattttactacatagttatctatcttaaaaactataccatatcctcctgtagatatgtgataaaaatcgtcgtttataggataaaatcgtttatccttttgttggaaaaaggatgaattaatgtaatcattctcttctatctttagtagtgtttccttattaaaattcttaaaataatttaacaatctaactgacggagcccaattttggtgtaaatctaattgggacattatattgttaaaatacaaacagtctcctaatataacagtatctgataatctatggggagacatccattgatattcaggggatgaatcattggcaacacccatttattgtacaaaaagccccaatttacaaacgaaagtccaggtttgatagagacaaactattaactattttgtctctgtttttaacacctccacagtttttaatttctttagtaatgaaattattcacaatatcagtatcttctttatctaccagagattttactaacttgataaccttggctgtctcattcaatagggtagtaatatttgtatgtgtgatattgatatctttttgaattgtttcttttagaagtgattctttgatggtgccagcatacgaattacaataatgcagaaactcggttaacatgcaggaattatagtaagccaattccaattgttgcctgtgttgtattagagtgtcaatatgagcaatggtgtccttgcgtttctctgatagaatgcgagcagcgattttggcgttatcatttgacgatatttctggaatgacgaatcctgtttctactaactttttggtaggacaaagtgaaacaatcaagaagatagcttctcctcctatttgtggaagaaattgaactcctctagatgatctactgacgatagtatctccttgacagatattggaccgaattacagaagtacctggaatgtaaagccctgaaaccccctcattttttaagcagattgttgccgtaaatcctgcactgtgaccaagatagagagctcctttggtgaatccatctctatgtttcagtttaaccaagaaacagtcagctggtctaaaatttccatctctatctaatacagcatctaacttgatgtcaggaactatgaccggtttaatgttatatgtaacattgagtaaatccttaagttcataatcatcactgtcatcagttatgtacgatccaaacaatgtttctactggcatagtggatacgaagatgctatccatcagaatgtttccctgattagtattttctatatagctattcttctttaaacgattttccaaatcagtaactatgttcatttttttaggagtaggacgcctagccagtatggaagaggattttctagatcctctcttcaacatctttgatctcaatggaatgcaaaaccccatagtgaaacaaccaacgataaaaataatattgtttttcactttttataattttaccatctgactcatggattcattaatatctttataagagctactaacgtataattctttataactgaactgagatatatacaccggatctatggtttccataattgagtaaatgaatgctcggcaataactaatggcaaatgtataaaacaacgaaattatactagagttgttaaagttaatattttctatgagctgttccaataaattatttgttgtgactgcgttcaagtcataaatcatcttgatactatccagtaaacagtctttaagttctggaatattatcatcccattgtaaagcccctaattcgactatcgaatatcctgctctgatagcagtttcaatatcgacggacgtcaatactgtaataaaggtggtagtattgtcatcatcgtgataaactacgggaatatggtcgttagtaggtacggtgactttacacaacgcgatatataactttccttttgtaccatttttaacgtagttgggacgtcctgcagggtattgttttgaagaaatgatatcgagaacagatttgatacgatatttgttggattcctgattattcactataatataatctagacagatagatgattcgataaatagagaaggtatatcgttggtaggataatacatccccattccagtattctcggatactctattgatgacactagttaagaacatgtcttctattctagaaaacgaaaacatcctacatggactcattaaaacttctaacgctcctgattgtgtctcgaatgcctcgtacaaggatttcaaggatgccatagattctttgaccaacgatttagaattgcgtttagcatctgatttttttattaaatcgaatggtcggctctctggtttgctaccccaatgataacaatagtcttgtaaagataaaccgcaagaaaatttatacgcatccatccaaataaccctagcaccatcggatgatattaatgtattattatagattttccatccacaattattgggccagtatactgttagcaacggtatatcgaatagattactcatgtaacctactagaatgatagttcgtgtactagtcataatatctttaatccaatctaagaaatttaaaattagattttttacactgttaaagttaacaaaggtattacccggatacgtggatatcatatatggcattggtccattatcagtaatagctccataaactgatacggcgatggtttttatatgtgtttgatctaacgaggaagaaattcgcgcccacaattcatctctagatatgtatttaatatcaaacggtaacacatcaatttcgggacgcgtatatgtttctaaatttttaatccaaatataatgatgacctatatgccctattatcatactgtcaactatagtacacctagagaacttacgatacatctgtttcctataatcgttaaattttacaaatctataacatgctaaaccttttgacgacaaccattcattaatttctgatatggaatctgtattctcgataccgtattgttctaaagccagtgctatatctccctgttcgtgggaacgctttcgtataatatcgatcaacggataatctgaagtttttggagaataatatgactcatgatctatttcgtccataaacaatctagacataggaattggaggcgatgatcttaattttgtgcaatgagtcgtcaatcctataacttctaatattgtaatattcatcatcgacataacactatctatgttatcatcgtatattagtataccacggccttcttcatttcgtgccaaaataatatacagtcttaaataattacgcaatatctcaatagtttcataattgttagctgttttcatcaaggtttgtatcctgtttaacatgatggcgttctataacgtctctattttctatttttaattttttaaatttttaacgatttactgtggctagatacccaatctctctcaaatatttttttagcctcgcttacaagctgtttatctatactattaaaactgacgaatccgtgattttggtaatgggttccgtcgaaatttgccgaagtgatatgaacatattcgtcgtcgactatcaacaattttgtattattctgaatagtgaaaaccttcacagatagatcattttgaacacacaacgcgtctagacttctggcggttgccatagaatatacgtcgttcttatcccaattaccaactagaagtctgatcttaactcctctattaatggctgcttctataatggagttgtaaatgtcaggccaatagtagctattaccgtcgacacgtgtagtgggaactatggccaaatgttcaatatctatactagtcttagccgacttgagtttatcaataactacatcagtgtctagatctctagaatatcccaataggtgttctggagaatcagtaaagaacactccacctataggattcttaatatgatacgcagtgctaactggcagacaacaagccgcagagcataaattcaaccatgaattttttgcgctattaaaggctttaaaagtatcaaatcttctacgaagatctgtggccagcgggggataatcagaatatacacctaacgttttaatcgtatgtatagatcctccagtaaatgacgcgtttcctacataacatctttcatcatctgacacccaaaaacaaccgagtagtagtcccacattattttttttatctatattaacggttataaaatttatatccgggcagtgactttgtagctctcccagatttcttttccctcgttcatctagcaaaactattattttaatccctttttcagatgcctcttttagtttatcaaaaataagcgcgcccctagtcgtactcagaggattacaacaaaaagatgctatgtatatatatttcttagctagagtgataatttcgttaaaacattcaaatgttgttaaatgatcggatctaaaatccatattttctggtagtgtttctaccagcctacattttgctcccgcaggtaccggtgcaaatggccacatttagttaacataaaaacttatacatcctgttctatcaacgattctagaatatcatcggctatatcgctaaaattttcatcaaagtcgacatcacaacctaactcagtcaatatattaagaagttccatgatgtcatcttcgtttatttctatatccgtatccattgtagattgttgaccgattatcgagtttaaatcattactaatactcaatccttcagaatacaatctgtgtttcattgtaaatttataggcggtgtatttaagttggtagattttcaattatgtatcaatatagcaacagtagttcttgctcctccttgattctagcatcctcttcattattttcttctacgtacataagcatgtccaatacgttagacaacacaccgacgatggcggccgccacagacacgaatatgactagaccgatgaccatttaaaaacccctctctagctttcacttaaactgtatcgattattcttttagaacatgtataatataaaaacattattctatttcgaatttaggcttccaaaaatttttcatccgtaaaccgataataatatatatagacttgttaatagtcggaataaatagattaatgcttaaactatcatcatctccacgattagagatacaatatttacattctttttgctgtttcgaaactttatcaatacacgttaatacaaacccaggaaggagatattgaaactgaggctgttgaaaatgaaacggtgaatacaataattcagataatgtaaaatcatgattccgtattctgatgatattagaactgctaatggatgtcgatggtatgtatctaggagtatctattttaacaaagcatcgatttgctaatatacaattatcattttgattaattgttattttattcatattcttaaaaggtttcatatttatcaattcttctacattaaaaatttccatttttaatttatgtagccccgcaatactcctcattacgtttcattttttgtctataatatccattttgttcatctcggtacatagattatccaattgagaagcgcatttagtagttttgtacattttaagtttattgacgaatcgtcgaaaactagttatagttaacattttattatttgataccctgatattaatacccctgccgttactattatttataactgatgtaacccacgtaacattagaattaattatcgatagtaatgcatcgacgcttccaaaattgtctattataaactcaccgataatttttttattgcatgttttcatattcattaggattatcaaatctttaatcttattacgattgtatgcgttgatattacaagacgtcattctaaaagacggaggatctccatcaaatgccagacaatcacgtacaaagtacatggaaataggttttgttctattgcgcatcatagattcatatagaacacccatagaaatactaatttgttttactctataaaatactaatgcatctatttcatcgttttgtataacgtctttccaagtgccaaattccaaatttttttcattgatagtaccaaattcttctatctctttaactacttgcatagataggtaattacagtgatgcctacatgccgttttttgaaactgaatagatgcgtctagaagcgatgctacactagtcacaatcaccactttcatatttagaatatatgtatgtaaaaatatagtagaatttcattttgtttttttctatgctataaatgaattctcattttgcatctgctcatactccgttttatatcaataccaaagaaggaagatatctggttctaaaagccgttaaagtatgcgatgttagaactgtagaatgcgaaggaagtaaagcttcctgcgtactcaaagtagataaaccctcatcgcccgcgtgtgagagaagaccttcgtccccgtccagatgcgagagaatgaataaccctggaaaacaagtcccgtttatgaggacggacatgctacaaaatatgttcgcggctaatcgcgataatgtagcttctagacttttgtcctaaaatactattatatccttttcgatattaataaatccgtgtcgtccaggttttttatctctttcagtatgtgaatagataggtattttatctctattcatcatcgaatttaagagatccgataaacattgtttgtattctccagatgtcagcatctgatacaacaatatatgtgcacataaacctctggcacttatttcatgtaccttccccttatcactaaggagaatagtatttgagaaatatgtatacatgatattatcatgaattagatatacagaatttgtaacactctcgaaatcacacgatgtgtcggcgttaagatctaatatatcactcgataacacattttcatctagatacactagacattttttaaagctaaaatagtctttagtagtgacagtaactatgcgattattttcatcgatgatacatttcatcggcatattattacgcttaccatcaaagactataccatgtgtatatctaacgtattctagcatggttgccatacgtgcattaaacttttcaggatctttggatagatcttccaatctatctatttgagaaaacatttttatcatgttcaatagttgaaacgtcggatccactatatagatattatctataaagattttaggaactacgttcatggtatcctggcgaatattaaaactatcaatgatatgattatcgttttcatcttttatcaccatatagtttctaagatatgggattttacttaatataatattatttcccgtgataaattttattagaaaggccaaatctataagaaaagtcctagaattagtctgaagaatatctatatcgccgtaccgtatatttggattaattagatatagagaatatgatccgtaacatatacaacttttattatggcgtctaagatattcttccatcaacttattaacatttttgactagggaagatacattatgacgtcccattacttttgccttgtctattactgcgacgttcatagaatttagcatatctcttgccaattcttccattgatgttacattataagaaattttagatgaaattacatttggagctttaatagtaagaactcctaatatgtccgtgtatgtggtcactaatacagattgtagttctataatcgtaaataatttacctatattatatgtttgagtctgtttagaaaagtagctaagtatacgatcttttatttctgatgcagatgtatcaacatcggaaaaaaatctttttttattcttttttactaaagatacaaatatgtctttgttaaaaacagttattttctgaatatttctagcttgtaattttaacatatgatattcgttcacactaggtactctgcctaaataggtttctataatctttaatgtaatattaggaagagtattctgatcaggattcctattcattttgaggatttaaaactctgattattgtctaatatggtctcaacacaaactttttcacagagcgatagagtttttgataactcgtttttcttaagaaatataaaactactgtttccagagctcgctctatcttttattttatctaattcgatacaaactcctgatactggttcagaaagtaattcattaattttcagtcctttatagaagatatttaatatagataatacaaaattttcagttcttgatatcgatctgattgatcctagaactagatatattaataacgtgctcattaggcagtttatggcagcttgataattagatatagtatattccagttcatatttattagataccgcattgcccagattttgatattctatgaattcctctgaaaataaatccaaaataactagacattctattttttgtggattagtgtactctcttccctctatcatgttcactactggtgtccacgatgataaatatctagagggaatataatatagtccataggatgccaatctagcaatgtcgaataactgtaatttgattcttcgttcttcattatgaattgattcttgaggtataaacctaacacaaattatattattagacttttcgtatgtaatgtctttcatgttataagtttttaatcctggaatagaatctattttaatgaggcttttaaacgcagagttctccaacgagtcaaagcataatactctgttgtttttcttatatacgatgttacgattttcttctttgaatggaataggtttttgaattagtttataattacaacataatagataaggaagtgtgcaaatagtacgcggaaaaaacataatagctcccctgttttcatccatggttttaagtaaatgatcactggcttctttagtcaatggatattcgaacattaaccgtttcatcatcattggacagaatccatatttcttaatgtaaagagtgatcaaatcattgtgtttattgtaccatcttgttgtaaatgtgtattcggttatcggatctgctcctttttctattaaagtatcgatgtcgatctcgtctaagaattcaactatatcgacatatttcatttgtatacacataaccattactaacgtagaatgtataggaagagatgtaacgggaacagggtttgttgattcgcaaactattctaatacataattcttctgttaatacgtcttgcacgtaatctattatagatgccaagatatctatataattattttgtaagatgatgttaactatgtgatctatataagtagtgtaataattcatgtatttcgatatatgttccaactctgtctttgtgatgtctagtttcgtaatatctatagcatcctcaaaaaatatattcgcatatattcccaagtcttcagttctatcttctaaaaaatcttcaacgtatggaatataataatctattttacctcttctgatatcattaatgatatagtttttgacactatcttctgtcaattgattcttattcactatatctaagaaacggatagcgtccctaggacgaactactgccattaatatctctattatagcttctggacataattcatctattataccagaattaatgggaactattccgtatctatctaacatagttttaagaaagtcagaatctaagacctgatgttcatatattggttcatacatgaaatgatctctattgatgatagtgactatttcattctctgaaaattggtaactcattctatatatgctttccttgttgatgaaggatagaatatactcaatagaatttgtaccaacaaactgttctcttatgaatcgtatatcatcatctgaaataatcatgtaaggcatacatttaacaattagagacttgtctcctgttatcaatatactattcttgtgataatttatgtgtgaggcaaatttgtccacgttctttaattttgttatagtagatatcaaatccaatggagctacagttcttggcttaaacagatatagtttttctggaacgaattctacaacattattataaaggactttgggtagataagtgggatgaaatcctattttaattaatgcgatagccttgtcctcgtgcagatatccaaacgcttttgtgatagtatggcattcattgtctagaaacgctctacgaatatctgtgacagatatcatctttagagaatatactagtcgcgttaatagtactacaatttgtattttttaatctatctcaataaaaaaattaatatgtatgattcaatgtataactaaactactaactgttattgataactagaatcagaatctaatgatgacgtaaccaagaagtttatctactgccaatttagctgcattatttttagcatctcgtttagattttccatctgccttatcgaatactcttccgtcgatgtctacacaggcataaaatgtaggagagttactaggccccactgattcaatacgaaaagaccaatctctcctagtaatttggcagtactcattaataacggtgacagggttagcacctttccaatcaataatttttttagccggaataacatcatcaaaagacttatgatcctctctcattgatttttcgcgggatacatcatctattatggcgtcagccataacatcagcatccggcttatccgcctccgttgtcataaaccaacgaggaggaatatcgtcggagctgtacaccatagcactacgttgaagatcgtacagagctttattaacttctcgcttctccatattaagttgtctagttagttgtgcagcagtagctccttcgattccaatggttttaatagcctcacacacaatctctgcgttagaacgttcgtcgatatagattttagacatttttagagagaactaacacaaccagcaataaaactgaacctactttatcatttttttattcatcatcctctggtggttcgtcgttcctatcgaatgtggatctgattaacccgtcatctataggtgatgctggttctggagattctggaggagatggattattatctggaagaatctctgttatttccttgttttcatgtatcgattgcgttgtaacattaagattgcgaaatgctctaaatttgggaggcttaaagtgttgtttgcaatctctacacgcatgtctaactagtggaggttcgtcagcggctctagtttgaatcatcatcggcgtagtattcctacttttacagttaggacacggtgtattgtatttctcgtcgagaacgttaaaataatcgttgtaactcacatcctttattttatctatattgtattctactcctttcttaatgcattttataccgaataagagatagcgaaggaattctttttcggtgccgctagtacccttaatcatatcacatagtgttttatattccaaatttgtggcaatagacggtttatttctatacgatagtttgtttctggaatcctttgagtattctataccaatattattctttgattcgaatttagtttcttcgatattagattttgtattacctatattcttgatgtagtactttgatgatttttccatggcccattctattaagtcttccaagttggcatcatccacatattgtgatagtaattctcggatatcagtagcggctaccgccattgatgtttgttcattggatgagtaactactaatgtatacattttccatttataacacttatgtattaactttgttcatttatattttttcattattatgttgatattaacaaaagtgaatatatatgttaataattgtattgtggttatacggctacaatttcataatgagtggaagtcagtgtccgatgatcaatgacgatagctttactctgaaaagaaagtatcaaatcgatagtgcggagtcaacaataaaaatggataagaagaggataaagtttcagaatagagccaaaatggtaaaagaaataaatcagacaataagagcagcacaaactcattacgagacattgaaactaggatacataaaatttaagagaatgattaggactactactctagaagatatagcaccatctattccaaataatcagaaaacttataaactattctcggacatttcagccatcggcaaagcatcacagaatccgagtaagatggtatatgctctgctgctttacatgtttcccaatttgtttggagatgaccatagattcattcgttatagaatgcatccaatgagtaaaatcaaacacaagatcttctctcctttcaaacttaatcttattagaatattagtggaagaaagattctataataatgaatgcagatctaataaatggagaataattggaacacaagttgataaaatgttgatagctgaatctgataaatatacaatagatgcaaggtataacctaaaacccatgtatagaatcaagggaaaatctgaagaagataccctcttcatcaaacagatggtagaacaatgtgtgacatcccaggaattggtggaaaaagtgttgaagatactgtttagagatttgttcaagagtggagaatacaaagcatacagatacgatgatgatgtagaaaatggatttattggattggatacactaaaattaaacattgttcatgatatagttgaaccatgtatgcctgttcgtaggccagtggctaagatactgtgtaaagaaatggtaaataaatactttgagaatccgctacatattattggtaaaaatcttcaagagtgcattgactttgttagtgaataggcatttcatctttctccaatactaattcaaattgttaaattaataatggatagtataaatagttattagtgataaaatagtaaaaataattattagaataagagtgtagtatcatagataactctcttctataaaaatggattttattcgtagaaagtatcttatatacacagtagaaaataatatagattttttaaaggatgatacattaagtaaagtaaacaattttaccctcaatcatgtactagctctcaagtatctagttagcaattttcctcaacacgttattactaaggatgtattagctaataccaatttttttgttttcatacatatggtacgatgttgtaaagtgtacgaagcggttttacgacacgcatttgatgcacccacgttgtacgttaaagcattgactaagaattatttatcgtttagtaacgcaatacaatcgtacaaggaaaccgtgcataaactaacacaagatgaaaaatttttagaggttgccgaatacatggacgaattaggagaacttataggcgtaaattatgacttagttcttaatccattatttcacggaggggaacccatcaaagatatggaaatcatttttttaaaactgtttaagaaaacagacttcaaagttgttaaaaaattaagtgttataagattacttatttgggcatacctaagcaagaaagatacaggcatagagtttgcggataatgatagacaagatatatatactctatttcaacaaactggtagaatcgtccatagcaatctaacagaaacgtttagagattatatctttcccggagataagactagctattgggtgtggttaaacgaaagtatagctaatgatgcggatatcgttcttaatagacacgccattaccatgtatgataaaattcttagttatatatactctgagataaaacaaggacgcgttaataaaaacatgcttaagttagtttatatctttgagcctgaaaaagatatcagagaacttctgctagaaatcatatatgatattcctggagatatcctatctattattgatgcaaaaaacgacgattggaaaaaatattttattagtttttataaagctaattttattaacggtaatacatttattagtgatagaacgtttaacgaggacttattcagagttgttgttcaaatagatcccgaatatttcgataatgaacgaattatgtctttattctctacgagtgctgcggacattaaacgatttgatgagttagatattaataacagttatatatctaatataatttatgaggtgaacgatatcacattagatacaatggatgatatgaagaagtgtcaaatctttaacgaggatacgtcgtattatgttaaggaatacaatacatacctgtttttgcacgagtcggatcccatggtcatagagaacggaatactaaagaaactgtcatctataaaatccaagagtagacggctgaacttgtttagcaaaaacattttaaaatattatttagacggacaattggctcgtctaggtcttgtgttagatgattataaaggagacttgttagttaaaatgataaaccatcttaagtctgtggaggatgtatccgcattcgttcgattttctacagataaaaaccctagtattcttccatcgctaatcaaaactattttagctagttataatatttccatcatcgtcttatttcaaaggtttttgagagataatctatatcatgtagaagaattcttggataaaagcatccatctaaccaagacggataagaaatatatacttcaattgataagacacggtagatcatagaacagaccaaatatattattaataatttgtatatacatagatataattatcacatattaaaaattcacacatttttgataaatgggaactgctgcaacaattcagactcccaccaaattaatgaataaagaaaatgcagaaatgattttggaaaaaattgttgatcatatagttatgtatattagtgacgaatcaagtgattcagaaaataatcctgaatatattgattttcgtaacagatacgaagactatagatctctcattataaaaagtgatcacgagtttgtaaagctatgtaaaaatcatgcagagaaaagttctccagaaacgcaacaaatgattatcaaacacatatacgaacaatatcttattccagtatctgaagtactattaaaacctataatgtccatgggtgacataattacatataacggatgtaaagacaatgaatggatgctagaacaactctctaccctaaactttaacaatctccgcacatggaactcatgtagcataggcaatgtaacgcgtctgttttatacattttttagttatctgatgaaagataaactaaatatataagtataatcccattctaatactttaacctgatgtattacctgcatcttattagaatattaacctaactaaaagacataacataaaaactcattacatagttgataaaaagcggtaggatataaatattatggctgccaccgttccgcgttttgacgacgtgtacaaaaatgcacaaagaagaattctagatcaagaaacattttttagtagaggtctaagtagaccgttaatgaaaaacacatatctatttgataattacgcgtatggatggataccagaaactgcaatttggagtagtagatacgcaaacttagatgcaagtgactattatcccatttcgttgggattacttaaaaagttcgagtttctcatgtctctatataaaggtcctattccagtatacgaagaaaaagtaaatactgaattcatagccaatggatcgttctctggtagatacgtatcatatcttcgaaagttttctgctcttccaacaaacgagtttattagttttttgttactgacttccattccaatctataatatcttgttctggtttaaaaatactcagtttgatattactaaacacacattattcagatacgtctatacagataatgccaaacacctggcgttggctaggtatatgcatcaaacaggagactataagcctttgtttagtcgtctcaaagagaattatatatttaccggtcccgttccaataggtatcaaagatatagatcaccctaatcttagtagagcaagaagtccatccgattatgagacattagctaatattagtactatattgtactttaccaagtatgatccggtattaatgtttttattgttttacgtacctgggtattcaattactacaaaaattactccagccgtagaatatctaatggataaactgaatctaacaaagagcgacgtacaactgttgtaaattattttatgcttcgtaaaatgtaggttttgaaccaaacattctttcaaagaatgagatgcataaaactttattatccaatagattgactatttcggacgtcaatcgtttaaagtaaacttcgtaaaatattctttgatcactgccgagtttaaaacttctatcgataattgtctcatatgttttaatatttacaagttttttggtccatggtacattagccggacaaatatatgcaaaataatatcgttctccaagttctatagtttctggattatttttattatattcagtaaccaaatacatattagggttatctgcggatttataatttgagtgatgcattcgactcaacataaataattctagaggagacgatctactatcaaattcggatcgtaaatctgtttctaaagaacggagaatatctatacatacctgattagaattcatccgtccttcagacaacatctcagacagtctggttttgtacatcttaatcatattcttatgaaacttggaaacatctcttctagtttcactagtacctttattaattctctcaggtacagattttgaattcgacgatgccgagtatttcatcgttgtatatttcttcttcgattgcataatcagattcttatataccgcctcaaactctattttaaaattattaaacaatactctactattaatcagtcgttctaactctttcgctatttctatagacttatctacatcttgactgtctatctctgtaaacacggagtcggtatctccatacacgctacgaaaacgaaatctgtaatctataggcaacgatgttttcacaatcggattaatatctctatcgtccatataaaatggattacttaatggattggcaaaccgtaacataccgttagataactctgctccatttagtaccgattctagatacaagatcattctacgtcctatggatgtgcaactcttagccgaagcgtatgagtatagagcactatttctaaatcccatcagaccatatactgagttggctactatcttgtacgtatattgcatggaatcataaatggccttttcagttgaactggtagcctgttttaacatctttttatatctggctctctctgccaaaaatgttcttaatagtctaggaatggttccttctatcgatctatcgaaaattgctatttcagagatgaggttcggtagtctaggttcacaatgaaccgtaatatatctaggaggtggatatttctgaagcaatagctgattatttatttcttcttccaatctattggtactaacaacgacaccgactaatgtttccggagatagatttccaaagatacacacattaggatacagactgttataatcaaagattaatacattattactaaacattttttgttttggagcaaataccttaccgccttcataaggaaacttttgttttgtttctgatctaactaagatagttttagtttccaacaatagctttaacagtggacccttgatgactgtactcgctctatattcgaataccatggattgaggaagcacatatgttgacgcacccgcgtctgtttttgtttctactccataatactcccacaaatactgacacaaacaagcatcatgaatacagtatctagccatatctaaagctatgtttagattataatccttatacatctgagctaaatcaacgtcatcctttccgaaagataatttatatgtatcattaggtaaagtaggacataatagtacgactttaaatccattttcccaaatatctttacgaattactttacatataatatcctcatcaacagtcacataattacctgtggttaaaacctttgcaaatgcagcggctttgcctttcgcgtccgtagtatcgtcaccgatgaacgtcatttctctaactcctctatttaatactttacccatgcaactgaacgcgttcttggatatagaatccaatttgtacgaatccaatttttcagatttttgaatgaatgaatatagatcgaaaaatatagttccattattgttattaacgtgaaacgtagtattggccatgccgcctactcccttatgactagactgatttctctcataaatacagagatgtacagcttcctttttgtccggagatctaaagataatcttctctcctgttaataactctagacgattagtaatatatctcagatcaaagttatgtccgttaaaggtaacgacgtagtcgaacgttagttccaacaattgtttagctattcgtaacaaaactatttcagaacatagaactagttctcgttcgtaatccatttccattagtgactgtatcctcaaacatcctctatcgacggcttcttgtatttcctgttccgttaacatctcttcattaatgagcgtaaacaataatcgtttaccacttaaatcgatataacagtaacttgtatgcgagattgggttaataaatacagaaggaaacttcttatcgaagtgacactctatatctagaaataagtacgatcttgggatatcgaatctaggtatttttttagcgaaacagttacgtggatcgtcacaatgataacatccattgttaatctttgtcaaatattgctcgtccaacgagtaacatccgtctggagatatcccgttagaaatataaaaccaactaatattgagaaattcatccatggtggcattttgtatgctgcgtttctttggctcttctatcaaccacatatctgcgacggagcattttctatctttaatatctagattataacttattgtctcgtcaatgtctatagttctcatctttcccaacggcctcgcattaaatggaggaggagacaatgactgatatatttcgtccgtcactacgtaataaaagtaatgaggaaatcgtataaatacggtctcaccatttcgacatctggatttcagatataaaaatctgttttcaccgtgactttcaaaccaattaatgcaccgaacatccatttatagaatttagaaatatattttcatttaaatgaatcccaaacattggggaagagccgtatggaccattatttttatagtactttcgcaagcgggtttagacggcaacatagaagcgtgtaaacgaaaactatatactatagtcagcactcttccatgtcctgcatgtagacggcacgcgactatcgctatagaggacaataatgtcatgtctagcgatgatctgaattatatttattattttttcatcagattatttaacaatttggcatctgatcccaaatacgcgatcgatgtgacaaaggttaaccctttataaacttaacccattataaaacttatgattagtcacaactgaaataaccgcgtgattattttttggtataattctacacggcatggtttctgtaactatgaattcaacccccgttacattagtgaaatctttaacaaacagcaagggttcgtcaaagacataaaactcattgtttacaatcgaaatagaccccctatcacacttaaaataaaaaatatccttatcctttaccaccaaataaaattctgattggtcaatgtgaatgtattcacttaacagttccacaaatttatttattaactccgaggcacatacatcgtcggtattttttatggcaaactttactcttccagcatccgtttctaaaaaaatattaacgagttccatttatatcatccaatattattgaaatgacgttgatggacagatgatacaaataagaaggtacggtacctttgtccaccatctcctccaattcatgctctattttgtcattaactttaatgtatgaaaacagtacgccacatgcttccatgacagtgtgtaacactttggatacaaaatgtttgacattagtataattgttcaagactgtcaatctataatagatagtagctataatatattctatgatggtattgaagaagatgacaaccttggcatattgatcatttaacacagacatggtatcaacagatagcttgaatgaaagagaatcagtaattggaataagcgtcttctcgatagagtgtccgtataccaacatgtctgatattttgatgtattccattaaattatttagttttttctttttattttcgttaaacagcatttctgtcaacggaccccaacatcgttgaccgattaagttttgattgatttttccgtgtaatgcgtatctagtcagatcgtatagcctatccaataatccatcatctgtgcgtagatcacatcgtacactttttaattctctatagaagagcgacagacatctggagcaattacagacagcaatttctttattctctacagatgtaagatacttgaagacattcctatgatgatgcagaattttggataacacggtattgatggtatctgttaccataattcctttgatggctgatagtgtcagagcacaagatttccaatctttgacaatttttagcaccattatctttgttttgatatctatatcagacagcatggtgcgtctgacaacacagggattaagacggaaagatgaaatgattctctcaacatcttcaatggataccttgctattttttctggcattatctatatgtgcgagaatatcctctagagaatcagtatcctttttgatgatagtggatctcaatgacatgggacgtctaaaccttcttattttatcaccagattgcatggtgatttgtcttctttcttttatcataatgtaatctctaaattcatcggcaaattgtctatatctaaaatcataatatgagatgtttacctctacaaatatctgttcgtccaatgttagagtatctacatcagttttgtattccaaattaaacatggcaacggatttaattttatattcctctattaagtcctcgtcgataataacagaatgtagataatcatttaatccatcgtacatggttggaagatgcttgttgacaaaatctttaattgtcttgatgaaggtgggactatatctaacatcttgattaataaaatttataacattgtccataggatactttgtaactagttttatacacatctcttcatcggtaagtttagacagaatatcgtgaacaggtggtatattatattcatcagatatacgaagaacaatgtccaaatctatattgtttaatatattatatagatgtagcgtagctcctacaggaatatctttaactaagtcaatgatttcatcaaccgttagatctattttaaagttaatcatataggcattgatttttaaaaggtatgtagccttgactacattctcattaattaaccattccaagtcactgtgtgtaagaagattatattctatcataagcttgactacatttggtcccgataccattaaagaattcttatgatataaggaaacagcttttaggtactcatctactctacaagaattttggagagccttaacgatatcagtgacgtttattatttcaggaggaaaaaacctaacattgagaatgtcggagttaatagcttccagatacagtgattttggcaatagtccgtgtaatccataatccagtaacacgagctggtgcttgctagacaccttttcaatgtttaatttttttgaaataagctttgataaagccttcctcgcaaattccggatacatgaacatgtcggcgacatgattaagtattgttttttcattatttttatattttctcaacaagttctcaataccccaatagatgatagaatatcacccaatgcgtccatgttgtctatttccaacaggtcgctatatccaccaatagaagtttttccaaaaaagattctaggaacagttctaccaccagtaatttgttcaaaatagtcacgcaattcattttcgggtttaaattctttaatatcgacaatttcatacgctcctcttttgaaactaaacttatttagaatatccagtgcatttctacaaaaaggacatgtatacttgacaaaaattgtcactttgttattggccaacctttgttgtacaaattcctcggccattttaatatttaagtgatataaaactatctcgacttatttaactctttagtcgagatatatggacgcagatagctatatgatagccaactacagaaggcaaacgctataaaaaacataattacgacgagcatatttataaatatttttattcagcattacttgatatagtaatattaggcacagtcaaacattcaaccactctcgatacattaactctctcattttctttaacaaattctgcaatatcttcgtaaaaagattcttgaaactttttagaatatctatcgactctagatgaaatagcgttcgtcaacatactatgttttgtatacataaaggcgcccattttaacagtttctagtgacaaaatgctagcgatcctaggatcctttagaatcacatagattgacgattcgtctctcttagtaactctagtaaaataatcatacaatctagtacgcgaaataatattatccttgacttgaggagatctaaacaatctagttttgagaacatcgataagttcatcgggaatgacatacatactatctttaatagaactcttttcatccagttgaatggattcgtccttaaccaactgattaatgagatcttctattttatcattttccagatgatatgtatgtccattaaagttaaattgtgtagcgcttctttttagtctagcagccaatactttaacatcactaatatcgatatacaaaggagatgatttatctatggtattaagaattcgtttttcgacatctgtcaaaaccaattcctttttgcctgtatcatccagttttccatcctttgtaaagaaattattttctactagactattaataagactgataaggattcctccataattgcacaatccaaactttttaacaaaactagactttacaagatctacaggaatgcgtacttcaggtttcttagcttgtgattttttcttttgtggacattttcttgtgaccaactcatctaccatttcattgattttagcagtgaaataagctttcaatgcacgggcactgatactattgaaaacgagttgatcttcaaattccgccatttaagttcaccaaacaacttttaaatacaaatatatcaatagtagtagaataagaactataaaaaaaataataattaaccaataccaaccccaacaaccggtattattagttgatgtgactgttttctcatcacttagaacagatttaacaatttctataaagtctgtcaaatcatcttccggagaccccataaatacaccaaatatagcggcgtacaacttatccatttatacattgaatattggcttttctttatcgctatcttcatcatattcatcatcaatatcaacaagtcccagattacgagccagatcttcttctacattttcagtcattgatacacgttcactatctccagagagtccgataacgttagccaccacttctctatcaatgattagtttcttgagtgcgaatgtaatttttgtttccgttccggatctatagaaaactacaggtgtgataattgccttggccaattgtctttctcttttactgagtgattctagttcaccttctatagatctgagaatggatgattctccagtcgaaacatattctaccatggatccgtttaatttgttgatgaagatggattcatccttaaatgttttctctgtaatagtttccaccgaaagactatgcaaagaatttggaatgcgttccttgtgcttaatgtttccatagacggcttctagaagttgatacaacataggactagccgcggtaacttttatttttagaaagtatccatcgcttctatcttgtttagatttatttttataaagtttagtctctccttccaacataataaaagtggaagtcatttgactagataaactatcagtaagttttatagagatagacgaacaattagcgtattgagaagcatttagtgtaacgtattcgatacattttgcattagatttactaatcgattttgcatactctataacacccgcacaagtctgtagagaatcgctagatgcagtaggtcttggtgaagtttcaactctcttcttgattaccttactcatgattaaacctaaataattgtactttgtaatataatgatatatattttcactttatctcatttgagaataaaaatgtttttgtttaaccactgcatgatgtacagatttcggaatcgcaaaccaccagtggttttattttatccttgtccaatgtgaattgaatgggagcggatgcgggtttcgtacgtagatagtacattcccgtttttagaccgagactccatccgtaaaaatgcatactcgttagtttggaataactcggatctgctatatggatattcatagattgactttgatcgatgaaggctcccctgtctgcagccatttttatgatcgtcttttgtggaatttcccaaatagttttataaactcgcttaatatcttctggaaggtttgtattctgaatggatccaccatctgccataatcctattcttgatctcatcattccataattttctctcggttaaaactctaaggagatgcggattaactacttgaaattctccagacaatactctccgagtgtaaatattactggtatacggttccaccgactcattatttcccaaaatttgagcagttgatgcagtcggcataggtgccaccaataaactatttctaagaccgtatgttctgattttatcttttagaggttcccaattccaaagatccgacggtacaacattccaaagatcatattgtagaataccgttactggcgtacgatcctacatatgtatcgtatggtccttccttctcagctagttcacaactcgcctctaatgcaccgtaataaatggtttcgaagatcttcttatttagatcttgtgcttccaggctatcaaatggataatttaagagaataaacgcgtccgctaatccttgaacaccaataccgataggtctatgtctcttattagagatttcagcttctggaataggataataattaatatctataattttattgagatttctgacaattactttgaccacatccttcagtttgagaaaatcaaatcgcccatctattacaaacatgttcaaggcaacagatgccagattacaaacggctacctcattagcatccgcatattgtattatctcagtgcaaagattactacacttgatagttcctaaattttgttgattactctttttgttacacgcatccttataaagaatgaatggagtaccagtttcaatctgagattctataatcgctttccagacgactcgagcctttattatagatttgtatctcctttctctttcgtatagtgtatacaatcgttcgaactcgtctccccaaacattgtccaatccaggacattcatccggacacatcaacgaccactctccgtcatccttcactcgtttcataaagagatcaggaatccaaagagctataaatagatctctggttctatgttcctcgtttcctgtattctttttaagatcgaggaacgccataatatcagaatgccacggttccaagtatatggccataactccaggccgtttgtttcctccctgatctatgtatctagcggtgttattataaactctcaacattggaataataccgtttgatataccattggtaccggagatatagcttccactggcacgaatattactaattgatagacctattccccctgccattttagagattaatgcgcatcgttttaacgtgtcatagataccctctatgctatcatcgatcatgttaagtagaaaacagctagacatttggtgacgactagttcccgcattaaataaggtaggagaagcgtgcgtaaaccatttttcagaaagtagattgtacgtctcaatagctgagtctatatcccattgatgaattcctactgcgacacgcattaacatgtgctgaggtctttcaacgatcttgttgtttattttcaacaagtaggatttttccaaagttttaaaaccaaaatagttgtatgaaaagtctcgttcgtaaataataaccgagttgagtttatccttatatttgttaactatatccatggtgatacttgaaataatcggagaatgtttcccatttttaggattaacatagttgaataaatcctccatcacttcactaaatagtttttttgtttccttgtgtagatttgatacggctattctggcggctagaatggcataatccggatgttgtgtagtacaagtggctgctatttcggctgccagagtgtccaattctaccgttgttactccattatatattccttgaataaccttcatagctattttaataggatctatatgatccgtgtttaagccataacataattttctaatacgagacgtgattttatcaaacatgacattttccttgtatccatttcgtttaatgacaaacatttttgttggtgtaataaaaaaattatttaacttttcattaatagggatttgacgtatgtagcgtacaaaattatcgttcctggtatatagataaagagtcctatatatttgaaaatcgttacggctcgattaaactttaatgattgcatagtgaatatatcattaggatttaactccttgactatcagggcggcaccagaaattaccatcaaaagcattaatacagttatgccgatcgcagttagaacggttatagcatccaccatttatatctaaaaattagatcaaagaatatgtgacaaagtcctagttgtatactgagaattgacgaaacaatgtttcttacatatttttttcttattagtaactgacttaatagtaggaactggaaagctagacttgattattctataagtatagatacccttccaaataatattctctttgataaaagttccagaaaatgtagaattttttaaaaagttatcttttgctattaccaagattgtgtttagacgcttattattaatatgagtgatgaaatccacaccgcctctagatatcgcttttatttccacattagatggtaaatccaatagtgaaactatctttttaggaatgtatggactcgcgtttagaggagtgaacgtcttaggcgtcggaaaggatgattcatcaaacgaataaacaatttcacaaatggatgttaatgtattagtaggaaattttttgacgctagtggaattgaagattctaatggatgatgttctacctatttcatccgataacatgttaatttccgacaccaacggttttaatatttcgatgatatacggtagtctctctttcggacttatatagcttattccacaatacgagtcattatatactccaaaaaacaaaataactagtataaaatctgtatcgaatgggaaaaacgaaattatcgacataggtatagaatctggaacattgaacgtattaatacttaattctttttctgtggtaagtaccgataggttattgacattgtatggttttaaatattctataacttgagacttgatagatattagtgatgaattgaaaattatttttatcaccacgtgtgtttcaggatcatcgtcgacgcccgtcaaccaaccgaatggagtaaaataaatatcattaatatatgctctagatattagtatttttatcaatcctttgattatcatcttctcgtaggcgaatgattccatgatcaagagtgatttaagaacatcctccggagtattaatgggcttagtaaacagtccatcgttgcaataataaaagttatccaagttaaaggatattatgcattcgtttaaagatatcacctcatctgacggagacaattttttggtaggttttagagactttgaagctacttgtttaacaaagttattcatcgtcgtttactattctatttaattttgtagttaatttatcacatatcacattaattgactttttggtccatttttccatacgtttatattcttttaatcctgcgttatccgtttccgttatatccagggatagatcttgcaagttaaatagaatgctcttaaataatgtcatttttttatccgctaaaaatttaaagaatgtataaacttttttcaaagatttaaaacttttaggtggagttctagtacacaatatcataaacaaactaataaacatcccgcattcagattccaacagctgattaacttccacattaatacagcctattttcgctccaaatgtacattcgaaaaatctgaataaaacatcgatgtcacaatttgtattatccaatacagaatgtctgtgattcgtgttaaaaccatcggagaaggaatagaaataaaaattattatagtggtggaattcagttggaatattgcctccggagtcataaaaggatactaaacattgttttttatcataaattacacatttccaatgagacaaataacaaaatccaaacattacaaatctagaggtagaacttttaattttgtctttaagtatatacgataagatatgtttattcataaacgcgtcaaatttttcatgaatcgctaaggagtttaagaatctcatgtcaaattgtcctatataatccacttcggatccataagcaaactgagagactaagttcttaatacttcgattgctcatccaggctcctctctcaggctctattttcatcttgacgacctttggattttcaccagtatgtattcctttacgtgataaatcatcgattttcaaatccatttgtgagaagtctatcgccttagatactttttcccgtagtcgaggtttaaagaaatacgctaacggtatactagtaggtaactcaaagacatcatatatagaatggtaacgcgtctttaactcgtcggttaactctttcttttgatcgagttcgtcgctactattgggtctgctcaggtgccccgactctactagttccaacatcataccgataggaatacaagacactttgccagcggttgtagatttatcatatttctccactacatatccgttacaatttgttaaaaatttagatacatctatattgctacataatccagctagtgaatatatatgacataataaattggtaaatcctagttctggtattttactaattactaaatctgtatatctttccatttatcatggaaaagaatttaccagatatcttcttttttccaaactgcgttaatgtattctcttacaaatattcacaagatgaattcagtaatatgagtaaaacggaacgtgatagtttctcattggcggtgtttccagttataaaacatagatggcataacgcacacgttgtaaaacataaaggaatatacaaagttagtacagaagcacgtggaaaaaaagtatctcctccatcactaggaaaacccgcacacataaacctaaccgcgaagcaatatatatacagtgaacacacaataagctttgaatgttatagttttctaaaatgtataacaaatacagaaatcaattcgttcgatgagtatatattaagaggactattagaagctggtaatagtttacagatattttccaattccgtaggtaaacgaacagatactataggtgtactagggaataagtatccatttagcaaaattccattggcctcattaactcctaaagcacaacgagagatattttcagcgtggatttctcatagacctgtagttttaactggaggaactggagtgggtaagacgtcacaggtacccaagttattgctttggtttaattatttatttggtggattctctactctagataaaatcactgactttcacgaaagaccagtcattctatctcttcctaggatagctttagttagattgcatagcaataccattttaaaatcattgggatttaaggtactagatggatctcctatttctttacggtacggatctataccggaagaattaataaacaaacaaccaaaaaaatatggaattgtattttctacccataagttatctctaacaaaactatttagttatggcactcttattatagacgaagttcatgagcatgatcaaataggagatattattatagcagtagcgagaaagcatcatacgaaaatagattctatgtttttaatgactgccacgttagaggatgacagggaacggctaaaagtatttttacctaatcccgcatttatacatattcctggagatacactgtttaaaattagcgaggtatttattcataataagataaatccatcttccagaatggcatacatagaagaagaaaagagaaatttagttactgctatacagatgtatactcctcctgatggatcatccggtatagtctttgtggcatccgttgcacagtgtcacgaatataaatcatatttagaaaaaagattaccgtatgatatgtatattattcatggtaaggtcttagatatagacgaaatattagaaaaagtgtattcatcacctaatgtatcgataattatttctactccttatttggaatccagcgttactatacacaatgttacacacatttatgatatgggtagagtttttgtccccgctccttttggaggatcgcaacaatttatttctaaatctatgagagatcaacgaaaaggaagagtaggaagagttaatcctggtacatacgtctatttctatgatctgtcttatatgaagtctatacagcgaatagattcagaatttctacataattatatattgtacgctaataagtttaatctaacactccccgaagatttgtttataatccctacaaatttggatattctatggcgtacaaaggaatatatagactcgttcgatattagtacagaaacatggaataaattattatccaattattatatgaagatgatagagtatgctaaactttatgtactaagtcctattctcgctgaggagttggataactttgagaggacgggagaattaactagtattgtacgagaagccattttatctctaaatttacgaattaagattttaaattttaaacataaagatgatgatacgtatatacacttttgtaaaatattattcggtgtctataacggaacaaacgctactatatattatcatagacctctaacgggatatatgaatatgatttcagatactatatttgttcctgtagataataactaaaaatcaaactctaatgaccacatctttttttagagatgaaaaattttctacatctccttttgtagacacgactaaacattttgcagaaaaaagtttattagtgtttagataatcgtatacttcatcagtgtagatagtaaatgtgaacagataaaaggtattcttgctcaatagattggtaaattccatagaatatattaatcctttcttcttgagatcccacatcatttcaaccagagacgttttatccaatgatttacctcgtactataccacatacaaaactagattttgcagtgacgtcgtacctggtattcctaccaaacaaaattttacttttagttcttttagaaaattctaaggtagaatctctatttgccaatatgtcatctatggaattaccactagcaaaaaatgatagaaatatatattgatacatcgcagctggttttgatctactatactttaaaaacgaatcagattccataattgcctgtatatcatcagctgaaaaactatgttttacacgtattccttcggcatttctttttaatgatatatcttgtttagacaatgataaagttatcatgtccatgagagacgcgtctccgtatcgtataaatatttcattagatgttagacgcttcattaggggtatacttctataaggtttcttaatcagtccatcattggttgcgtcaagaactactatcggatgttgttgggtatctctagtgttacacatggccttactaaagtttgggtaaataactatgatatctctattaattatagatgcatatatttcattcgtcaaggatattagtatcgacttgctatcgtcattaatacgtgtaatgtaatcatataaatcatgcgatagccaaggaaaatttaaatagatgttcatcatataatcgtcgctataattcatattaatacgttgacattgactaatttgtaatatagcctcgccacgaagaaagctctcgtattcagtttcatcgataaaggataccgttaaatataactggttgccgatagtctcatagtctattaagtggtaagtttcgtacaaatacagaatccctaaaatattatctaatgttggattaatctttaccataactgtataaaatggagacggagtcataactattttaccgtttgtacttactggaatagatgaaggaataatctccggacatgctggtaaagacccaaatgtctgtttgaagaaatccaatgttccaggtcctaatctcttaacaaaaattacgatattcgatcccgatatcctttgcattctatttaccagcatatcacgaactatattaagattatctatcatgtctattctcccaccgttatataaatcgcctccgctaagaaacgttagtatatccatacaatggaatacttcatttctaaaatagtattcgttttctaattctttaatgtgaaatcgtatactagaaagggaaaaattatctttgagttttccgttagaaaagaaccacgaaactaatgttctgattgcgtccgattccgttgctgaattaatggatttacaccaaaaactcatataacttctagatgtagaagcattcgctaaaaaattagtagaatcaaaggatataagtagatgttccaacaagtgagcaattcccaagatttcatctatatcattctcgaatccgaaattagaaattcccaagtagatatcctttttcatccgatcgttgatgaaaatacgaactttattcggtaagacaatcatttactaaggagtaaaataggaagtaatgttcgtatgtcgttatcatcgtataaattaaaggtgtgttttttaccattaagtgacattataattttaccaatattggaattataatataggtgtatttgcgcactcgcgacggttgatgcatcggtaaatatagctgtatctaatgttctagtcggtatttcatcatttcgctgtctaataatagcgttttctctatctgtttccattacagctgcctgaagtttattggtcggataatatgtaaaataataagaaatacatacgaataacaaaaataaaataagatataataaagatgccatttagagatctaattttgttcaacttgtccaaattcctacttacagaagatgaggaatcgttggagatagtgtcttccttatgtagaggatttgaaatatcttatgatgacttgataacttactttccagataggaaataccataaatatatttataaagtatttgaacatgtagatttatcggaggaattaagtatggaattccatgatacaactttgcgagatttagtttatcttagattgtacaagtattccaagtgtatacggccgtgttataaattaggagataatctaaaaggcatagttgttataaaggacaggaatatttatattagggaagcaaatgatgacttgatagaatatctcctcaaggaatacactcctcagatttatacatattctaatgagcgcgtccccataactggttcaaaattaattctttgtggattttctcaagttacatttatggcgtatacaacgtcgcatataacaacaaataaaaaggtagatgttctcgtttccaaaaaatgtatagatgaactagtcgatccaataaattatcaaatacttcaaaatttatttgataaaggaagcggaacaataaacaaaatactcaggaagatattttattcggtaaccggtggccaaactccataggtagctttttctatttcggattttagaatttccaaattcaccagcgatttatcggttttggtgaaatccaaggatttattaatgtccacaaatgccatttgttttgtctgtggattgtatttgaaaatggaaacgatgtagttagatagatgcgctgcgaagtttcctattagggttccgcgcttcacgtcacccagcatacttgaatcaccatcctttaaaaaaaatgataagatatcaacatggagtatatcatactcggattttaattcttctactgcatcactgacattttcacaaatactacaatacggtttaccgaaaataatcagtacgttcttcatttatgggtatcaaaaacttaaaatcgttactgctggaaaataaatcactgacgatattagatgataatttatacaaagtatacaatggaatatttgtggatacaatgagtatttatatagccgtcgccaattgtgtcagaaacttagaagagttaactacggtattcataaaatacgtaaacggatgggtaaaaaagggagggcatgtaaccctttttatcgatagaggaagtataaaaattaaacaagacgttagagacaagagacgtaaatattctaaattaaccaaggacagaaaaatgctagaattagaaaagtgtacatccgaaatacaaaatgttaccggatttatggaagaagaaataaaggcaaaaatgcaattaaaaatcgataaacttacatttcaaatatatttatctgattctgataacataaaaatatcattgaatgagatactaacacatttcaacaataatgagaatgttacattattttattgtgatgaacgagacgcagaattcgttatgtgtctcgaggctaaaacacatttctctaccacaggagaatggccgttgataataagtaccgatcaggatactatgctatttgcatctactgataatcatcctaagatgataaaaaacttaactcaactgtttaaatttgttccctcggcagaggataactatttagcaaaattaacggcgttagtgaatggatgtgatttctttcctggactctatggggcatctataacacccaccaacttaaacaaaatacaattgtttagtgattttacaatcgataatatagtcactagtttggcaattaaaaattattatagaaagactaactctaccgtagacgtgcgtaatattgttacgtttataaacgattacgctaatttagacgatgtctactcgtatgttcctccttgtcaatgcactgttcaagaatttatattttccgcattagatgaaaaatggaatgaatttaaatcatcttatttagagaccgttccgttaccctgtcaattaatgtacgcgttagaaccacgtaaggagattgatgtttcagaagttaaaactttatcatcttatatagatttcgaaaatactaaatcagatatcgatgttataaaatctatatcctcgatttttggatattctaacgaaaactgtaacacgatagtattcggcatctataaggataatttactactgagtataaataattcattttactttaacgatagtctgttaataaccaatactaaaagtgataatataataaatataggttactagattaaaaatggtgttccaactcgtgtgctctacatgcggtaaagatatttctcacgaacgatataaattgattatacgaaaaaaatcattaaaggatgtactcgtcagtgtaaagaacgaatgttgtaggttaaaattatctacacaaatagaacctcaacgtaacttaacagtgcaacctctattggatataaactaatatggatccggttaattttatcaagacatatgcgcctagaggttctattatttttattaattataccatgtcattaacaagtcatttgaatccatcgatagaaaaacatgtgggtatttattatggtacgttattatcggaacacttggtagttgaatctacctatagaaaaggagttcgaatagtcccattggatagtttttttgaaggatatcttagtgcaaaagtatacatgttagagaatattcaagttatgaaaatagcagctgatacgtcattaactttattgggtattccgtatggatttggtcatgatagaatgtattgttttaaattggtagctgactgttataaaaatgccggtgttgaaacatcgtctaaacgaatattaggtaaagatatttttctgagccaaaacttcacagacgataatagatggataaagatatatgattctaataatttaacattttggcaaattgattaccttaaagggtgagttaatatgcataactactcctccgttgttttttccctcgttctttttcttaacgttgtttgccatcactctcataatgtaaagatattctaaaatggtaaacttttgcatatcggacgcagaaattggtataaatgttgtaattgtattatttcccgtcaatggactagtcacagctccatcagttttatatcctttagagtatttctcactcgtgtctaacattctagagcattccatgatctgtttatcgttgatattggccggaaagatagattttttattttttattatattactattggcaattgtagatataacttctggtaaatatttttctaccttttcaatctcttctattttcaagccggctatatattctgctatattgttgctagtatcaataccttttcttgctaagaagtcatatgtggtattcactatatcagttttaactggtagttccattagcctttccacttctgcagaataatcagaaattggttctttaccagaaaatccagctactataataggctcaccgatgatcattggcaaaatcctatattgtaccagattaatgagagcatatttcatttccaataattctgctagttcttgagacattgatttatttgatgaatctagttggttctctagatactctaccatttctgccgcatacaataacttgttagataaaatcagggttatcaaagtgtttagcgtggctagaatagtgggcttgcatgtattaaagaatgcggtagtatgagtaaaccgttttaacgaattatatagtctccagaaatctgtggcgttacatacatgagccgaatgacatcgaagattgtccaatatttttaatagctgctctttgtccattatttctatatttgactcgcaacaattgtagataccattaatcactgattcctttttcgatgccggacaatagcacaattgtttagctttggactctatgtattcagaattaatagatatatctcttaatacagattgcactatacattttgaaactatgtcaaaaattgtagaacgacgctgttctgcagccatttaactttaaataatttacaaaaatttaaaatgagcatccgtataaaaatcgataaactgcgccaaattgtggcatatttttcagagttcagtgaagaagtgtctataaatgtagactcgacggatgagttaatgtatatttttgccgccttgggcggatctgtaaacatttgggccattatacctctcagtgcatcagtgttctaccgcggagccgaaaatattgtgtttaatcttccggtgtccaaggtaaaatcgtgtttgtgtagttttcacaatgatgccatcatagatatagaacctgatctggaaaataatctagtaaaactttctagttatcatgtagtaagtgtcgattgtaacaaggaactgatgcctattaggacagatactactatttgtctaagtatagatcaaaagaaatcttacgtgtttaattttcacaagtatgaagaaaaatgttgtggtagaaccgtcattcatttagaatggttgttgggctttatcaagtgtattagtcagcatcagcatttggctattatgtttaaagatgacaatattattatgaagactcctggtaatactgatgcgttttccagggaatattctatgactgaatgttctcaagaactacaaaagttttctttcaaaatagctatctcgtctctcaacaaactacgaggattcaaaaagagagtcaatgtttttgaaactagaatcgtaatggataatgacgataacattctaggaatgttgttttcggatagagttcaatcctttaagatcaacatctttatggcgtttttagattaatactttcaatgagataaatatgggtggcggagtaagtgttgagctccctaaacgggatccgcctccgggagtacccactgatgagatgttattaaacgtggataaaatgcatgacgtgatagctcccgctaagcttttagaatatgtgcatataggaccactagcaaaagataaagaggataaagtaaagaaaagatatccagagtttagattagtcaacacaggacccggtggtctttcggcattgttaagacaatcgtataatggaaccgcacccaattgctgtcgcacttttaatcgtactcattattggaagaaggatggaaagatatcagataagtatgaagagggtgcagtattagaatcgtgttggccagacgttcacgacactggaaaatgcgatgttgatttattcgactggtgtcagggggatacgttcgatagaaacatatgccatcagtggatcggttcagcctttaataggagtgatagaactgtagagggtcaacaatcgttaataaatctgtataataagatgcaaacattatgtagtaaagatgctagtgtaccaatatgtgaatcatttttgcatcatttacgcgcacacaatacagaagatagcaaagagatgatcgattatattctaagacaacagtctgcggactttaaacagaaatatatgagatgtagttatcccactagagataagttagaagagtcattaaaatatgcggaacctcgagaatgttgggatccagagtgttcgaatgccaatgttaatttcttactaacacgtaattataataatttaggactttgcaatattgtacgatgtaatactagcgtgaacaacttacagatggataaaacttcctcattaagattgtcatgtggattaagcaatagtgatagattttctactgttcccgtcaatagagcaaaagtagttcaacataatattaaacattcgttcgacctaaaattgcatttgatcagtttattatctctcttggtaatatggatactaattgtagctatttaaatgggtgccgcggcaagcatacagacgacggtgaatacactcagcgaacgtatctcgtctaaattagaacaagaagcgaacgctagtgctcaaacaaaatgtgatatagaaatcggaaatttttatatccgacaaaaccatggatgtaacctcactgttaaaaatatgtgctctgcggacgcggatgctcagttggatgctgtgttatcagccgctacagaaacatatagtggattaacaccggaacaaaaagcatacgtgccagctatgtttactgctgcgttaaacattcagacaagtgtaaacactgttgttagagattttgaaaattatgtgaaacagacttgtaattctagcgcggtcgtcgataacaaattaaagatacaaaacgtaatcatagatgaatgttacggagccccaggatctccaacaaatttggaatttattaatacaggatctagcaaaggaaattgtgccattaaagcgttgatgcaattgacgactaaggccactactcaaatagcacctagacaagttgctggtacaggagttcagttttatatgattgttatcggtgttataatattggcagcgttgtttatgtactatgccaagcgtatgctgttcacatccaccaatgataaaatcaaacttattttagccaataaggaaaacgtccattggactacttacatggacacattctttagaacttctccgatggttattgctaccacggatatacaaaactgaaaatatattgataatattttaatagattaacatggaagttatcgctgatcgtctagacgatatagtgaaacaaaatatagcggatgaaaaatttgtagattttgttatacacggtctagagcatcaatgtcctgctatacttcgaccattaattaggttgtttattgatatactattatttgttatagtaatttatatttttacggtacgtctagtaagtagaaattatcaaatgttgttggtggcgctagtcatcacattaactattttttattactttatactataatagtactagactgacttctaacaaacatctcacctgccataaataaatgcttgatattaaagtcttctatttctaacactattccatctgtggaaaataatactctgacattatcgctaattgacacatcggtgagtgatatgcctataaagtaataatcttctttgggcacatataccagtgtaccaggttctaacaacctatttactggtgctcctgtagcatactttttctttaccttgagaatatccatcgtttgcttggtcaatagcgatatgtgattttttatcaaccactcgaaaaagtaattggagtgttcatatcctctacgggctattgtctcatggccgtgtatgaaatttaagtaacacgactgtggtagatttgttctatagagccggttgccgcaaatagatagaactaccaatatgtctgtacaaatgttaaacattaattgattaacagaaaaaacaatgttcgttctgggaatagaaaccagatcaaaacaaaattcgttagaatatatgccacgtttatacattgaatataaaataactacagtttgaaaaataacagtatcatttaaacatttaacttgcggggttaatctcacaactttactgtttttaaactgttcaaaatatagcatcgatccatgagaaatacgtttagccgcctttaatagaggaaatcccaccgcctttctggatctcaccaacgacgatagttctgaccagcaactcatttcttcatcatccacctgttttaacatataataggcaggagatagatatccgtcattgcaatattccttctcgtaggcacacaatctaatattgataaaatctccattctcttctctgcatttattatcttgtttcggtggctgattaggctgtagtcttggtttaggctttggtatatcgttgttgaatctattttggtcattaaatctttcatttcttcctggtatatttttatcacctcgtttggttggatttttgtctatattatcgtttgtaacatcggtacgggtattcatttatcacaaaaaaaacttctctaaatgagtctactgctagaaaacctcatcgaagaagataccatattttttgcaggaagtatatctgagtatgatgatttacaaatggttattgccggcgcaaaatccaaatttccaagatctatgctttctatttttaatatagtacctagaacgatgtcaaaatatgagttggagttgattcataacgaaaatatcacaggagcaatgtttaccacaatgtataatataagaaacaatttgggtctaggagatgataaactaactattgaagccattgaaaactatttcttggatcctaacaatgaagttatgcctcttattattaataatacggatatgactgccgtcattcctaaaaaaagtggtaggagaaagaataagaacatggttattttccgtcaaggatcatcacctatcttgtgtattttcgaaactcgtaaaaagattaatatttataaagaaaatatggaatccgcatcgactgagtatacacctatcggagacaacaaggctttgatatctaaatatgcgggaattaatatcctaaatgtgtattctccttccacatccataagattgaatgccatttacggattcaccaataaaaataaactagagaaacttagtactaataaggaactagaatcgtatagttctagccctcttcaagaacccattaggttaaatgattttctgggactattggaatgtgttaaaaagaatattcctctaacagatattccgacaaaggattgattactataaatggagaatgttcctaatgtatactttaatcctgtgtttatagagcccacgtttaaacattctttattaagtgtttataaacacagattaatagttttatttgaagtattcgttgtattcattctaatatatgtattttttagatctgaattaaatatgttcttcatgcctaaacgaaaaatacccgatcctattgatagattacgacgtgctaatctagcgtgtgaagacgataaattaatgatctatggattaccatggatgacaactcaaacatctgcgttatcaataaatagtaaaccgatagtgtataaagattgtgcaaagcttttgcgatcaataaatggatcacaaccagtatctcttaacgatgttcttcgcagatgatgattcattttttaagtatttggctagtcaagatgatgaatcttcattatctgatatattgcaaatcactcaatatctagactttctgttattattattgatccaatcaaaaaataaattagaagccgtgggtcattgttatgaatctctttcagaggaatacagacaattgacaaaattcacagactttcaagattttaaaaaactgtttaacaaggtccctattgttacagatggaagggtcaaacttaataaaggatatttgttcgactttgtgattagtttgatgcgattcaaaaaagaatcctctctagctaccaccgcaatagatcctattagatacatagatcctcgtcgcgatatcgcattttctaacgtgatggatatattaaagtcgaataaagtgaacaataattaattctttattgtcatcatgaacggcggacatattcagttgataatcggccccatgttttcaggtaaaagtacagaattaattagacgagttggtaccaaaaattgaaaataaatacaaaggttcttgagggttgtgttaaattgaaagcgagaaataatcataaatactgcagaccatggaaaccgacacacttttgctctgggtactcctgttgtgggtgccaggttcaacaggggatgaagtgcaactggtcgagagtggaggaggcctcgtgcaaccggggggatcacttcggctgagctgcgcagcatctggctttaccatctccgattactggatacactgggttagacaagcaccaggtaaagggctggagtgggtggcaggcatcacgccggcaggagggtacacctattacgctgattctgtgaaaggccgatttactataagtgcagacacgtctaagaatacggcttatctgcaaatgaattcccttagggcagaggatacagctgtttattactgtgctcggtttgtgttcttcctcccgtacgcaatggactactggggtcaagggaccctggttacagttagtagtgggggaggaggttccggaggtgggggaagtggtggcggtggatctgatatccaaatgactcagagcccaagctcactttcagcatctgtaggagatcgcgtgacaataacgtgtcgcgcgtctcaggatgtgtccacggcagtcgcatggtaccaacaaaagccggggaaagctcccaagttgctcatctattctgcctcttttctttatagtggggtaccgagcagattctccggtagtggctccggtaccgactttacgctcacaataagttcactccagcccgaggatttcgcgacctactattgtcaacaggggtatggcaacccattcactttcggacagggaactaaagtcgaaattaaacgcggtggtggaggatcagggggcggcggatctgggggaggggggagccaagttcaattggtcgaaagtggagccgaagtgaaaaagcccggggcgtcagtcaaggtaagttgtaaggcttctggttacactttcacgggttattatatgcattgggtgcgccaagccccggggcagggattggaatggatggggtggataaaccctaatagcggcggaacaaactacgcccagaagttccagggaagagtaaccatgacgagagataccagtatctcaacggcatatatggagctttctcgccttaggagtgacgatacagcagtctactattgtgctcgctctcccaatccatattattatgattcctctggctattactacccaggggcctttgatatatggggacagggaacaatggttaccgttagtagcggcggtggtggatctggcgggggaggctcaggtggaggtggttcacaacccggccttacgcagcccccaagcgtgagcgtcgccccaggccaaacagctaggataacgtgcggtggcaataacatcggaagtaaaagtgtccactggtatcagcagaaaccgggtcaggccccggtcctcgttgtctatgacgactctgaccggccctcaggaatcccggagcggttttcagggtctaactcaggtaacaccgcaactttgactatttcacgcgtcgaagcaggtgatgaagccgattactattgtcaggtgtgggacagcagctccgaccactacgtctttggtactggcactaaggtcacggtcctgggacaatgattaattaatttttataaaaattgaaattttattttttttttttggaatataaatactcgagaccatgttcataaacataaaatccattctttggatgtgttccacactgattgtgactcatgcgctccataaggtcaaggtggggaaaagtccgccggttagagggagtctttccggaaaagtgtctcttccatgccattttagcaccatgcctactttgccgccgtcctacaatacatccgaattccttcgcataaaatggtcaaaaatcgaggtcgataaaaatggaaaggatctgaaagagacgactgtcttggtcgcccaaaacggaaatataaaaatcggacaagattacaaaggccgcgtgtcagttccgacgcatcccgaggctgtaggagatgcgagcttgactgtcgtaaaattgctcgctagcgatgctggactttaccgatgtgacgtgatgtacggtatcgaagatactcaagacactgtatctctcacagtagatggggtcgtcttccactatagggcggcaacctcccggtatactctcaattttgaggcggcgcagaaggcatgtctcgacgtcggggctgttatcgccacaccggaacagctctttgccgcttatgaggatggtttcgagcaatgtgacgccggttggctcgccgatcagacggttcgatatcccattcgggcgccgagggtgggctgttatggagataagatgggcaaagcaggtgtcaggacatatggattccgcagcccacaggaaacgtatgatgtgtactgctacgttgatcatctggacggagatgtctttcacctgacggtgccctccaaattcacttttgaggaggccgctaaagaatgtgagaatcaggatgcacgactcgcgaccgtaggtgagctgcaagcggcgtggaggaatgggttcgatcagtgtgactacgggtggctgtcagacgcctctgtcaggcaccctgtaactgtcgcaagagcgcaatgcggcggggggctcctgggagtacgaacgctctacaggtttgaaaaccagactggttttcctccaccagattcacgctttgatgcatattgcttcaagcgacggatgtcagacctgagtgtgattggacatcccatagattcagagtctaaggaagacgagccctgctccgaagaaacggacccagtccacgatctgatggctgaaatcctccccgagttccctgatattatagaaatagatctttatcactctgaggaaaatgaagaggaagaagaggagtgcgcaaacgccacggatgttacaacgacccccagtgtccagtatatcaatggaaagcaccttgttacgacagttcctaaggacccagaagctgctgaatgattaattaatttttatgagctcggaggtaatgatatgtatcaatcggtgtgtagaaagtgttacatcgactcataatattatattttttatctaaaaaactaaaaataaacattgattaaattttaatataatacttaaaaatggatgttgtgtcgttagataaaccgtttatgtattttgaggaaattgataatgagttagattacgaaccagaaagtgcaaatgaggtcgcaaaaaaactaccgtatcaaggacagttaaaactattactaggagaattattttttcttagtaagttacagcgacacggtatattagatggtgccaccgtagtgtatataggatcggctcctggtacacatatacgttatttgagagatcatttctataatttaggagtgatcatcaaatggatgctaattgacggccgccatcatgatcctattttaaatggattgcgtgatgtgactctagtgactcggttcgttgatgaggaatatctacgatccatcaaaaaacaactgcatccttctaagattattttaatttctgatgtaagatccaaacgaggaggaaatgaacctagtacggcggatttactaagtaattacgctctacaaaatgtcatgattagtattttaaaccccgtggcatctagtcttaaatggagatgcccgtttccagatcaatggatcaaggacttttatatcccacacggtaataaaatgttacaaccttttgctccttcatattcagctgaaatgagattattaagtatttataccggtgagaacatgagactgactcgagttaccaaattagacgctgtaaattatgaaaaaaagatgtactaccttaataagatcgtccgtaacaaagtagttgttaactttgattatcctaatcaggaatatgactattttcacatgtactttatgctgaggaccgtgtactgcaataaaacatttcctactactaaagcaaaggtactatttctacaacaatctatatttcgtttcttaaatattccaacaacatcaactgaaaaagttagtcatgaaccaatacaacgtaaaatatctagcaaaaattctatgtctaaaaacagaaatagcaagagatccgtacgcggtaataaatagaaacgtgctactgagatatactaccgatatagagtataatgatttagttactttaataaccgttagacataaaattgattctatgaaaactgtgtttcaggtatttaacgaatcatccataaattatactccggttgatgatgattatggagaaccaatcattataacatcgtatcttcaaaaaggtcataacaagtttcctgtaaattttctatacatagatgtggtaatatctgacttatttcctagctttgttagactagatactacagaaactaatatagttaatagtgtactacaaacaggcgatggtaaaaagactcttcgtcttcccaaaatgttagagacggaaatagttgtcaagattctctatcgccctaatataccattaaaaattgttagatttttccgcaataacatggtaactggagtagagatagccgatagatctgttatttcagtcgctgattaatcaattagtagagatgagataagaacattataataatcaataatattatcttatatctcgtttagaaaaatgctaatattaaaatagctaacgctagtaatccaatcggaagccatttgatatctataatagggtatctaatttcctgattcagatagcggacagctatattctcggtagctactcgtttggaatcacaaacattatttacatctaatttactatctgtaatggaaacgtttcccaatgaaatggtacaatccgatacattgcattttgttatatttttttttaaagaggctggtaacaacgcatcgcttcgtttacatggctcgtaccaacaataatagggtaatcttgtatctattcctatccgtactatgcttttatcaggataaatacatttacatcgtatatcgtctttgttagcatcacagaatgcataaatttgttcgtccgtcatgataaaaatttaaagtgtaaatataactattatttttatagttgtaataaaaagggaaatttgattgtatactttcggttctttaaaagaaactgacttgataaaaatggctgtaatctctaaggttacgtatagtctatatgatcaaaaagagattaatgctacagatattatcattagtcatgttaaaaatgacgacgatatcggtaccgttaaagatggtagactaggtgctatggatggggcattatgtaaaacttgtgggaaaacggaattggaatgtttcggtcactggggtaaagtaagtatttataaaactcatatagttaagcctgaatttatttcagaaattattcgtttactgaatcatatatgtattcactgcggattattgcgttcacgagaaccgtattccgacgatattaacctaaaagagttatcgggacacgctcttaggagattaaaggataaaatattatccaagaaaaagtcatgttggaacagcgaatgtatgcaaccgtatcaaaaaattactttttcaaagaaaaaggtttgtttcgtcaacaagttggatgatattaacgttcctaattctctcatctatcaaaagttaatttctattcatgaaaagttttggccattattagaaattcatcaatatccagctaacttattttatacagactactttcccatccctccgctgattattagaccggctattagtttttggatagatagtatacccaaagagaccaatgaattaacttacttattaggtatgatcgttaagaattgtaacttgaatgctgatgaacaggttatccagaaggcggtaatagaatacgatgatattaaaattatttctaataacactaccagtatcaatttatcatatattacatccggcaaaaataatatgattagaagttatatcgtcgcccgacgaaaagatcagaccgctagatctgtaattggtcccagtacatctatcaccgttaatgaggtaggaatgcccgcatatattagaaatacacttacagaaaagatatttgttaatgcctttacagtggataaagttaaacaactattagcgtcaaaccaagttaaattttactttaataaacgattaaaccaattaacaagaatacgccaaggaaagtttatcaaaaataaaatacatttattgcctggtgattgggtagaagtagctgttcaagaatatacaagtattatttttggaagacagccgtctctacatagatacaacgtcatcgcttcatctatcagagctaccgaaggagatactatcaaaatatctcccggaattgccaactctcaaaatgctgatttcgacggagatgaagaatggatgatattggagcaaaatcctaaagccgtaattgaacaaagtattcttatgtatccgacgacgttactcaaacacgatattcatggagcccccgtttatggatctattcaagatgaaatcgtagcagcgtattcattgtttaggatacaagatctttgtttagatgaagtattgaacatcttggggaaatatggaagagagttcgatcctaaaggtaaatgtaaattcagcggtaaagatatctatacttacttgataggtgaaaagattaattatccgggtctcttaaaggatggtgaaattattgcaaacgacgtagatagtaattttgttgtggctatgaggcatctgtcattggctggactcttatccgatcataagtcgaacgtggaaggtatcaactttattatcaagtcatcttatgtttttaagagatatctatctatttacggttttggggtgacattcaaagatctgagaccaaattcgacgttcactaataaattggaggccatcaacgtagaaaaaatagaacttatcaaagaagcatacgccaaatatctcaacgatgtaagagacgggaaaatagttccattatctaaagctttagaggcggactatgtggaatccatgttatccaacttgacaaatcttaatatccgagagatagaagaacatatgagacaaacgctgatagatgatccagataataacctcctgaaaatggccaaagcgggttataaagtaaatcctacagaactaatgtatattctaggtacgtatggacaacaaaggattgatggtgaaccagcagagactcgagtattgggtagagtcttaccttactatcttccagactctaaggatccagaaggaagaggttacattcttaattctttaacaaaaggattaacgggttctcaatattacttttcgatgctggttgccagatctcaatctactgatatcgtctgtgaaacatcacgtaccggaacactggctagaaaaatcattaaaaagatggaggatatggtggtcgacggatacggacaagtagttataggtaatacgctcatcaagtacgccgccaattataccaaaattctaggctcagtatgtaaacctgtagatcttatctatccagatgagtccatgacttggtatttggaaattagtgctctgtggaataaaataaaacagggattcgtttactctcagaaacagaaacttgcaaagaagacattggcgccgtttaatttcctagtattcgtcaaacccaccactgaggataatgctattaaggttaaggatctgtacgatatgattcataacgtcattgatgatgtgagagagaaatacttctttacggtatctaatatagattttatggagtatatattcttgacgcatcttaatccttctagaattagaattacaaaagaaacggctatcactatctttgaaaagttctatgaaaaactcaattatactctaggtggtggaactcctattggaattatttctgcacaggtattgtctgagaagtttacacaacaagccctgtccagttttcacactactgaaaaaagtggtgccgtcaaacaaaaacttggtttcaacgagtttaataacttgactaatttgagtaagaataagaccgaaattatcactctggtatccgatgatatctctaaacttcaatctgttaagattaatttcgaatttgtatgtttgggagaattaaatccagacatcactcttcgaaaagaaacagataaatatgtagtagatataatagttaatagattatacatcaagagagcagaaataaccgaattagttgtcgaatatatgattgaacgatttatctcctttagcgtcattgtaaaggaatggggtatggagacattcattgaggacgaggataatattagatttactgtctacctaaatttcgttgaaccggaagaattgaatcttagtaagtttatgatggttcttccgggtgccgccaacaagggcaagattagtaaattcaagattcctatctctgattatacgggttatgacgacttcaatcaaacaaaaaagctcaataagatgactgtagaactcatgaatctaaaagaattgggttctttcgatttggaaaacgtcaacgtgtatcctggagtatggaatacatacgatatcttcggtatcgaggccgctcgtgaatacttgtgcgaagccatgttaaacacctatggagaagggttcgattatctgtatcagccttgtgatcttctcgctagtttactatgtgctagttacgaaccagaatcagttaataaattcaagttcggtgcagctagtactcttaagagagctacgttcggagacaataaagcattgttaaacgcggctcttcataaaaagtcagaacctattaacgataatagtagctgccacttttttagcaaggtccctaatataggaactggatattacaaatactttatcgacttgggtcttctcatgagaatggaaaggaaactatctgataagatatcttctcaaaagatcaaggaaatggaagaaacagaagacttttaattcttatcaataacatatttttctatgatctgtcttttaaacgatggattttccacaaatgcgcctctcaagtccctcatagaatgatacacgtataaaaaatatagcataggcaatgactccttatttttagacattagatatgccaaaatcatagccccgcttctatttactcccgcagcacaatgaaccaacacgggctcgtttcgttgatcacatttagataaaaaggcggttacgtcgtcaaaatatttactaatatcggtagttgtatcatctaccaacggtatatgaataatattaatattagagttaggtaatgtatatttatccatcgtcaaatttaaaacatatttgaacttaacttcagatgatggtgcatccatagcatttttataatttcccaaatacacattattggttacccttgtcattatagtgggagatttggctttgtgcatatctccagttgaacgtagtagtaagtatttatacaaacttttcttatccatttataacgtacaaatggataaaactactttatcggtaaacgcgtgtaatttagaatacgttagagaaaaggctatagtaggcgtacaagcagccaaaacatcaacacttatattctttgttattatattggcaattagtgcgctattactctggtttcagacgtctgataatccagtctttaatgaattaacgagatatatgcgaattaaaaatacggttaacgattggaaatcattaacggatagcaaaacaaaattagaaagtgatagaggtagacttctagccgctggtaaggatgatatattcgacttcaaatgtgtggatttcggcgcctattttatagctatgcgattggataagaaaacatatctgccgcaagctattaggcgaggtactggagacgcgtggatggttaaaaaggcggcaaaggtcgatccatctgctcaacaattttgtcagtatttgataaaacacaagtctaataatgttattacttgtggtaatgagatgttaaatgaattaggttatagcggttattttatgtcaccgcattggtgttccgattttagtaatatggaatagtgttagataaatgcggtaacgaatgttcctgtaaggaaccataacagtttagatttaacgttaaagatgagcataaacataataaacaaaattacaatcaaacctataacattaatatcaaacaatccaaaaaatgaaatcagtggagtagtaaacgcgtacataactcctggataacgtttagcagctgccgttcctattctagaccaaaaattcggtttcatgttttcgaagcggtgttctgcaacaagtcggggatcgtgttctacatatttggcggcgttatccagtatctgcctattgatcttcatttcgttttcgattctggctatttcaaaataaaatcccgatgatagacctccagactttataatttcatctacgatgttcagcgccgtagtaactctaataatataggctgataagctaacatcataccctcctgtatatgtgaatatggcatgatttttgtccattacaagctcggttttaactttattgcctgtaataatttctctcatctgtaggatatctatttttttgtcatgcattgccttcaagacgggacgaagaaacgtaatatcctcaataacgttatcgttttctacaataactacatattctacctttttattttctaactcggtaaaaaaattagaatcccatagggctaaatgtctagcgatatttcttttcgtttcctctgtacacatagtgttacaaaaccctgaaaagaagtgagtatacttgtcatcatttctaatgtttcctccagtccactgtataaacgcataatccttgtaatgatctggatcatccttgactaccacaacatttcttttttctggcataacttcgttgtcctttacatcatcgaacttctgatcattaatatgctcatgaacattaggaaatgtttctgatggaggtctatcaataactggcacaacaataacaggagttttcaccgccgccatttagttattgaaattaatcatatacaactctttaatacgagttatattttcgtctatccattgtttcacatttacatatttcgacaaaaagatataaaatgcgtattccaatgcttctctgtttaatgaattactaaaatatacaaacacgtcactgtctggcaataaatgatatcttagaatattgtaacaatttattttgtattgcacatgttcgtgatctatgagttcttcttcgaatggcataggatctccgaatctgaaaacgtataaataggagttagaataataatatttgagagtattggtaatatataaactctttagcggtataattagtttttttctctcaatttctatttttagatgtgatggaaaaatgactaattttgtagcattagtatcatgaactctaatcaaaatcttaatatcttcgtcacacgttagctctttgaagtttttaagagatgcatcagttggttctacagatggagtaggtgcaacaattttttgttctacacatgtatgtactggagccattgttttaactataatggtgcttgtatcgaaaaactttaatgcagatagcggaagctcttcgccgcgactttctacatcgtaattgggttctaacgccgatctctgaatggatactagttttctaagttctaatgtgattctctgaaaatgtaaatccaattcctccggcattatagatgtgtatacatcggtaaataaaactatagtatccaacgatcccttctcgcaaattctagtcttaaccaaaaaatcgtatataaccacggagatggcgtatttaagagtggattcttctaccgttttgttcttggatgtcatataggaaactataaagtccgcactactgttaagaatgattactaacgcaactatatagttcaaattaagcattttggaaacataaaataactctgtagacgatacttgactttcgaataagtttgcagacaaacgaagaaagaacagacctctcttaatttcagaagaaaactttttttcgtattcctgacgtctagagtttatatcaataagaaagttaagaattagtcggttaatgttgtatttcattacccaagtttgagatttcataatattatcaaaagacatgataatattaaagataaagcgctgactatgaacgaaatagctatatggttcgctcaagaatatagtcttgttaaacgtggaaacgataactgtatttttaatcacgtcagcggcatctaaattaaatataggtatatttattccacacactctacaatatgccacaccatcttcataataaataaattcgttagcaaaattattaattttagtgaaatagttagcgtcaactttcatagcttccttcaatctaatttgatgctcacacggtgcgaattccactctaacatcccttttccatgcctcaggttcatcgatctctataatatctagtttcttgcgtttcacaaacacgggctcgtctctcgcgatgagatctgtatagtaactatgtaaatgataactagatagaaagatgtagctatatagatgacgatcctttaagagaggtataataactttaccccaatcagataaactattgttatggtcttcggaaaaagaatttttataaatttttccagtattttccaaatatacgtacttgacatctaaaaaatccttaatgataataggaatggataatccgtctattttataaagaaatacatatcgcacattatacttttttttggaaatgggaataccgatgtgtctacataaatatgcaaagtctaaatattttttagagaatcttagttggtccaaattcttttccaagtacggtaatagatttttcatattgaacggtatcttcttaatctctggttctagttccgcattaaatgatgaaactaagtcactatttttataactaacgattacatcacctctaacatcatcatttaccagaatactgatcttcttttgtcgtaaatacatgtctaatgtgttaaaaaaaagatcatacaagttatacgtcatttcatctgtggtattcttgtcattgaaggataaactcgtactaatctcttctttaacagcctgttcaaatttatatcctatatacgaaaaaatagcaaccagtgtttgatcatccgcgtcaatattctgttctatcgtagtgtataacaatcgtatatcttcttctgtgatagtcgatacgttataaaggttgataacgaaaatatttttatttcgtgaaataaagtcatcgtaggattttggacttatattcgcgtctagtagatatgcttttatttttggaatgatctcaattagaatagtctctttagagtccatttaaagttacaaacaactaggaaattggtttatgatgtataatttttttagtttttatagattctttattctatacttaaaaaatgaaaataaatacaaaggttcttgagggttgtgttaaattgaaagcgagaaataatcataaattatttcattatcgcgatatccgttaagtttgtatcgtaatggcgtggtcaattacaaataaagcggatactagtagcttcacaaagatggctgaaatcagagctcatctaaaaaatagcgctgaaaataaagataaaaacgaggatattttcccggaagatgtaataattccatctactaagcccaaaaccaaacgagccactactcctcgtaaaccagcggctactaaaagatcaaccaaaaaggaggaagtggaagaagaagtagttatagaggaatatcatcaaacaactgaaaaaaattctccatctcctggagtcagcgacattgtagaaagcgtggccgctgtagagctcgatgatagcgacggggatgatgaacctatggtacaagttgaagctggtaaagtaaatcatagtgctagaagcgatctttctgacctaaaggtggctaccgacaatatcgttaaagatcttaagaaaattattactagaatctctgcagtatcgacggttctagaggatgttcaagcagctggtatctctagacaatttacttctatgactaaagctattacaacactatctgatctagtcaccgagggaaaatctaaagttgttcgtaaaaaagttaaaacttgtaagaagtaaatgcgtgcacttttttataaagatggtaaactctttaccgataataattttttaaatcctgtatcagacgataatccagcgtatgaggttttgcaacatgttaaaattcctactcatttaacagatgtagtagtatatgaacaaacgtgggaggaggcgttaactagattaatttttgtgggaagcgattcaaaaggacgtagacaatacttttacggaaaaatgcatgtacagaatcgcaacgctaaaagagatcgtatttttgttagagtatataacgttatgaaacgaattaattgttttataaacaaaaatataaagaaatcgtccacagattccaattatcagttggcggtttttatgttaatggaaactatgttttttattagatttggtaaaatgaaatatcttaaggagaatgaaacagtagggttattaacactaaaaaataaacacatagaaataagtcccgatgaaatagttatcaagtttgtaggaaaggacaaagtttcacatgaatttgttgttcataagtctaatagactatataagccgctattgaaactgacggatgattctagtcccgaagaatttctgttcaacaaactaagtgaacgaaaggtatacgaatgtatcaaacagtttggtattagaatcaaggatctccgaacgtatggagtcaattatacgtttttatataatttttggacaaatgtaaagtccatatctcctcttccatcaccaaaaaagttaatagcgttaactatcaaacaaactgctgaagtggtaggtcatactccatcaatttcaaaaagagcttacatggcaacgactattttagaaatggtaaaggataaaaattttttagatgtagtatctaaaactacgttcgatgaattcctatctatagtcgtagatcacgttaaatcatctacggatggatgatatagatctttacacaaataattacaagaccgataaatggaaatggataagcgtatgaaatctctcgcaatgacagctttcttcggagagctaaacacattagatattatggcattgataatgtctatatttaaacgccatccaaacaataccattttttcagtggataaggatggtcagtttatgattgatttcgaatacgataattataaggcttctcaatatttggatctgaccctcactccgatatctggagatgaatgcaagactcacgcatcgagtatagccgaacaattggcgtgtgtggatattattaaagaggatattagcgaatatatcaaaactactccccgtcttaaacgatttataaaaaaataccgcaatagatcagatactcgtatcagtcgagatacagaaaagcttaaaatagctctagctaaaggcatagattacgaatatataaaagacgcttgttaataagtaaatgaaaaaaaactagtcgtttataataaaacacaatatggatgccaacatagtatcatcttctactattgcaacgtatatagacgctttagcaaagaatgcttcagaattagaacagaggtctaccgcatacgaaataaataatgaattggaactagtatttattaagccgccattaattactttgacaaatgtagtgaatatctctacgattcaggaatcgtttattcgatttaccgttactaataaggaaggtgtcaaaattagaactaagattccattatctaaggtacatggtctagatgtaaaaaatgtacagttagtagatgctatagataacatagtttgggaaaagaaatcattagtgacggaaaatcgtcttcacaaagaatgcttgttgagactatcgacagaggaacgtcatatatttttggattacaagaaatatggatcctctatccgactagaattagtcaatcttattcaagcaaaaacaaaaaactttacgatagactttaagctaaaatattttctaggatccggtgcccaatctaaaagttctttgttgcacgctattaatcatccaaagtcaaggcctaatacatctctggaaatagaattcacacctagagacaatgaaaaagttccatatgatgaactaataaaggaattgacgactctatcacgtcatatatttatggcttctccagagaatgtaattctttctccgcctattaacgcacctataaagacttttatgttgcctaaacaagatatagtaggtctggatctggaaaatctatatgccgtaactaagactgacggcattcctataactatcagagttacatcaaacgggttgtattgttattttacacatcttgggtatattattagatatccagttaagagaataatagattccgaagtagtagtctttggtgaggcagttaaggataagaactggaccgtatatctcattaagctaatagagcctgtgaatgcaatcaatgatagactagaagaaagtaagtatgttgaatctaaactagtggatatttgtgatcggatagtattcaagtcaaagaaatatgaaggtccgtttactacaactagtgaagtcgtcgatatgttatctacatatttaccaaagcaaccagaaggtgttattctgttctattcaaagggacctaaatctaacattgattttaaaattaaaaaggaaaatactatagaccaaactgcaaatgtagtatttaggtacatgtccagtgaaccaattatctttggagaatcgtctatctttgtagagtataagaaatttagcaacgataaaggctttcctaaagaatatggttctggtaagattgtgttatataacggcgttaattatctaaataatatctattgtttggaatatattaatacacataatgaagtgggtattaagtccgtggttgtacctattaagtttatagcagaattcttagttaatggagaaatacttaaacctagaatcgataaaaccatgaaatatattaactcagaagattattatggaaatcaacataatatcatagtcgaacatttaagagatcaaagcatcaaaataggagatatctttaacgaggataaactatcggatgtgggacatcaatacgccaataatgataaatttagattaaatccagaagttagttattttacgaataaacgaactagaggaccgttgggaattttatcaaactacgtcaagactcttcttatttctatgtattgttccaaaacatttttagacgattccaacaaacgaaaggtattggcgattgattttggaaacggtgctgacctggaaaaatacttttatggagagattgcgttattggtagcgacggatccggatgctgatgctatagctagaggaaatgaaagatacaacaaattaaactctggaattaaaaccaagtactacaaatttgactacattcaggaaactattcgatccgatacatttgtctctagtgtcagagaagtattctattttggaaagtttaatatcatcgactggcagtttgctatccattattcttttcatccgagacattatgctaccgtcatgaataacttatccgaactaactgcttctggaggcaaggtattaatcactaccatggacggagacaaattatcaaaattaacagataaaaagacttttataattcataagaatttacctagtagcgaaaactatatgtctgtagaaaaaatagctgatgatagaatagtggtatataatccatcaacaatgtctactccaatgactgaatacattatcaaaaagaacgatatagtcagagtgtttaacgaatacggatttgttcttgtagataacgttgatttcgctacaattatagaacgaagtaaaaagtttattaatggcgcatctacaatggaagatagaccgtctacaaaaaactttttcgaactaaatagaggagccattaaatgtgaaggtttagatgtcgaagacttacttagttactatgttgtttatgtcttttctaagcggtaaataataatatggtatgggttctgatatccccgttctaaatgcattaaataattccaatagagcgatttttgttcctataggaccttccaactgtggatactctgtattgttaatagatatattaatacttttgtcgggtaacagaggttctacgtcttctaaaaataaaagtttgataacatctggcctgttcataaataaaaacttggcgattctatatatactcttattatcaaatctagccattgtcttatagatgtgagctactgtaggtgtaccatttgattttctttctaatactatatatttctctcgaagaagttcttgcacatcatctgggaataaaatactactgttgagtaaatcagttattttttttatatcgatattgatggacatttttatagttaaggataataagtatcccaaagtcgataacgacgataacgaagtatttatacttttaggaaatcacaatgactttatcagatcaaaattaacaaaattaaaggagcatgtatttttttctgaatatattgtgactccagatacatatggatctttatgcgtcgaattaaatgggtctagttttcagcacggtggtagatatatagaggtggaggaatttatagatgctggaagacaagttagatggtgttctacatccaatcatatatctgaagatatacccgaagatatacacactgataaatttgtcatttatgatatatacacttttgacgctttcaagaataaacgattggtattcgtacaggtacctccgtcgttaggagatgatagctatttgactaatccgttattgtctccgtattatcgtaattcagtagccagacaaatggtcaatgatatgatttttaatcaagattcatttttaaaatatttattagaacatctgattagaagccactatagagtttctaaacatataacaatagttagatacaaggataccgaagaattaaatctaacgagaatatgttataatagagataagtttaaggcgtttgtattcgcttggtttaacggcgtttcggaaaatgaaaaggtactagatacgtataaaaaggtatctaatttgatataatgaattcagtgactgtatcacacgcgccatatactattacttatcacgatgattgggaaccagtaatgagtcaattggtagagttttataacgaagtagccagttggctgctacgagacgagacgtcgcctattcctgataagttctttatacagttgaaacaaccgcttagaaataaacgagtatgtgtgtgcggtatagatccgtatccgaaagatggaactggtgtaccgttcgaatcaccaaattttacaaaaaaatcaattaaggagatagcttcatctatatctagattaaccggagtaattgattataaaggttataaccttaatataatagacggggttataccctggaattattacttaagttgtaaattaggagaaacaaaaagtcacgcgatctactgggataagatttccaagttactgctgcagcatataactaaacacgttagtgttctttattgtttgggtaaaacagatttctcgaatatacgggcaaagttagaatccccggtaactaccatagtgggatatcatccagcggctagagaccgtcaattcgagaaagatcgatcatttgaaattatcaacgttttactggaattagacaacaaggtacctataaattgggctcaagggtttatttattaatgctttagtgaaattttaacttgtgttctaaatggatgcggctattagaggtaatgatgttatctttgttcttaagactataggtgtcccgtcagcgtgcagacaaaatgaagatccaagatttgtagaagcatttaaatgcgacgagttagaaagatatattgagaataatccagaatgtacactattcgaaagtcttagggatgaggaagcatactctatagtcagaattttcatggatgtagatttagacgcgtgtctagacgaaatagattatttaacggctattcaagattttattatcgaggtgtcaaactgtgtagctagattcgcgtttacagaatgcggcgccattcatgaaaatgtaataaaatccatgagatctaatttttcattgactaagtctacaaatagagataaaacaagttttcatattatctttttagacacgtataccactatggatacattgatagctatgaaacgaacactattagaattaagtagatcatctgaaaatccactaacaagatcgatagacactgccgtatataggagaaaaacaactcttcgggttgtaggtactaggaaaaatccaaattgcgacactattcatgtaatgcaaccacctcatgataatatagaagattacctattcacttacgtggatatgaacaacaatagttattacttttctctacaacgacgattggaggatttagttcctgataagttatgggaaccagggtttatttcattcgaagacgctataaaaagagtttcaaaaatattcattaattctataataaactttaatgatctcgatgaaaataattttacaacggtaccactggtcatagattacgtaacaccttgtgcattatgtaaaaaacgatcgcataaacatccgcatcaactatcgttggaaaatggtgctattagaatttacaaaactggtaatccacatagttgtaaagttaaaattgttccgttggatggtaataaactgtttaatattgcacaaagaattttagacactaactctgttttattaaccgaacgaggagaccatatagtttggattaataattcatggaaatttaacagcgaagaacccttgataacaaaactaattttgtcaataagacatcaactacctaaggaatattcaagcgaattactctgtccaagaaaacgaaagactgtagaagctaacatacgagacatgttagtagattcagtggagaccgatacctatccggataaacttccgtttaaaaatggtgtattggacctggtagacggaatgttttactctggagatgatgctaaaaaatatatgtgtactgtatcaaccggatttaaatttgacgatacaaagttcgtcgaagacagtccagaaatggaagagttaatgaatatcattaacgatatccaaccattaacggatgaaaataagaaaaatagagagctatatgaaaaaacattatctagttgtttatgcggtgctaccaaaggatgtttaacattcttttttggagaaactgcaactggaaagtcgacaaccaaacgtttgttaaagtctgctatcggtgacctgtttgttgagacgggtcaaacaattttaacagatgtattggataaaggacctaatccatttatcgctaacatgcatttgaaaagatctgtattctgtagcgaactacctgattttgcatgtagtgggtcaaagaaaatcagatctgataatattaaaaagttgacagaaccttgtgtcattggaagaccgtgtttctccaataaaattaataatagaaaccatgcgacaatcattatcgatactaattacaaacctgtttttgataggatagataacgcattaatgagaagaattgccgtcgtgcgattcagaacacacttttctcaaccttctggtagagaggctgctgaaaataatgacgcgtacgataaagtcaaactattagacgaggggttagatggtaaaatacaaaataatagatatagattcgcatttctatacttgttggtgaaatggtacagaaaatatcatgttcctattatgaaactatatcctacacccgaagagattcctgactttgcattctatctcaaaataggtactctgttggtatctagctctgtaaagcatattccattaatgacggacctctccaaaaagggatatatattgtacgataatgtggtcactcttccgttgactactttccaacagaaaatatccaagtattttaattctagactatttggacacgatatagagagcttcatcaatagacataagaaatttgccaatgttagtgatgaatatctgcaatatatattcatagaggatatttcatctccgtaaatatatgctcatatatttatagaagatatcacatatctaaatgaataccggaattatagatttatttgataatcatgttgatagtataccaactatattacctcatcagttagctactctagattatctagttagaactatcatagatgagaacagaagcgtgttattgttccatattatgggatcaggtaaaacaataatcgctttgttgttcgccttggtagcttccagatttaaaaaggtttacattctagtgccgaacatcaacatcttaaaaattttcaattataatatgggtgtagctatgaacttgtttaatgacgaattcatagctgagaatatctttattcattccacaacaagtttttattctcttaattataacgataacgtcattaattataacggattatctcgctacaataactctatttttatcgttgatgaggcacataatatctttgggaataatactggagaacttatgaccgtgataaaaaataaaaacaagattccttttctactattgtctggatctcccattactaacacacctaatactctgggtcatattatagatttaatgtccgaagagacgatagattttggtgaaattattagtcgtggtaagaaagtaattcagacacttcttaacgaacgcggtgtgaatgtacttaaggatttgcttaaaggaagaatatcatattacgaaatgcctgataaagatctaccaacgataagatatcacggacgtaagtttctagatactagagtagtatattgtcacatgtctaaacttcaagagagagattatatgattactagacgacagctatgttatcatgaaatgtttgataaaaatatgtataacgtgtcaatggcagtattgggacaacttaatctgatgaataatttagatactttatttcaggaacaggataaggaattgtacccaaatctgaaaataaataatggcgtgttatacggagaagaattggtaacgttaaacattagttccaaatttaaatactttattaatcggatacagacactcaacggaaaacattttatatacttttctaattctacatatggcggattggtaattaaatatatcatgctcagtaatggatattctgaatataatggttctcagggaactaatccacatatgataaacggcaaaccaaaaacatttgctatcgttactagtaaaatgaaatcgtctttagaggatctattagatgtgtataattctcctgaaaacgatgatggtagtcaattgatgtttttgttttcatcaaacattatgtccgaatcctatactctaaaagaggtaaggcatatttggtttatgactatcccagatactttttctcaatacaaccaaattcttggacgatctattagaaaattctcttacgccgatatttctgaaccagttaatgtatatcttttagccgccgtatattccgatttcaatgacgaagtgacgtcattaaacgattacacacaggatgaattaattaatgttttaccatttgacatcaaaaagctgttatatctaaaatttaagacgaaagaaacgaatagaatatactctattcttcaagagatgtctgaaacgtattctcttccaccacatccatcaattgtaaaagttttattgggagaattggtcagacaatttttttataataattctcgtattaagtataacgataccaagttacttaaaatggttacatcagttataaaaaataaagaagacgctaggaattacatagatgatattgtaaacggtcacttctttgtatcgaataaagtatttgataaatctcttttatacaaatacgaaaacgatattattacagtaccgtttagactttcctacgaaccatttgtttggggagttaactttcgtaaagaatataacgtggtatcttctccataaaactgatgagatatataaagaaataaatgtcgagctttgttaccaatggataccttccagttacattggagccacacgagctgacgttagacataaaaactaatattaggaatgccgtatataagacgtatctccatagagaaattagtggtaaaatggccaagaaaatagaaattcgtgaagacgtggaattacctctcggcgaaatagttaataattctgtagttataaacgttccgtgtgtaataacctacgcgtattatcacgttggggatatagttagaggaacattaaacatcgaagatgaatcaaatgtaactattcaatgtggagatttaatctgtaaactaagtagagattcgggtactgtatcatttagcgattcaaagtactgcttttttcgaaatggtaatgcgtatgacaatggcagcgaagtcactgccgttctaatggaggctcaacaaggtatcgaatctagttttgtttttctcgcgaatatcgtcgactcataagaaagagaatagcggtaagtataaacacgaatactatggcaataattgcgaatgttttattcccttcgatatatttttgataatatgaaaaacatgtctctctcaaatcggacaaccatctcataaaatagttatctcgcgctggcgaggtggttgccgctcgtataatctccccagaataatatacttgcgtgtcgtcgttcaatttatacggatttctatagttctctgttatataatgcggttttccatcatgattagacgacgacaatagtgttctaaatttagatagttgatcagaatgaatgtttattggcgttggaaaaattatccatgctgcgtctgcagagtggttgatagttgttcctagatatgtaaaataatccaacgtactaggtagcaaattgtctagataaaatactgaatcaaacggcgcagacgtattagcggatctaatggaatccaattgattgactatcttttgaaaatatacatttttatgatccgatacttgtaagaatatagaaataatgataagtccatcatcgtgtttttttgcctcttcataagaactatattttttcttattccaatgaacaagattaatctctccagagtatttgtacacatctatcaagtgattggatccataatcgtcttcctttccccaatatatatgtagtgatgataacacatattcattggggagaaaccctccacttatatatcctcctttaaaattaatccttactagttttccagtgttctggatagtggttggtttcgactcattataatgtatgtctaacggcttcaatcgcgcgttagaaattgcttttttagtttctatattaataggagatagttgttgcggcatagtaaaaatgaaatgataactgtttaaaaatagctcttagtatgggaattacaatggatgaggaagtgatatttgaaactcctagagaattaatatctattaaacgaataaaagatattccaagatcaaaagacacgcatgtgtttgctgcgtgtataacaagtgacggatatccgttaataggagctagaagaacttcattcgcgttccaggcgatattatctcaacaaaattcagattctatctttagagtatccactaaactattacggtttatgtactacaatgaactaagagaaatctttagacggttgagaaaaggttctatcaacaatatcgatcctcactttgaagagttaatattattgggtggtaaactagataaaaaggaatctattaaagattgtttaagaagagaattaaaagaggaaagtgatgaacgtataacagtaaaagaatttggaaatgtaattctaaaacttacaacacgggataaattatttaataaagtatatataggttattgcatggcgtgttttattaatcaatcgttggaggatttatcgcatactagtatttacaatgtagaaattagaaagattaaatcattaaatgattgtattaacgacgataaatacgaatatctgtcttatatttataatatgctagttaatagtaaatgaacttttacagatctagtataattagtcagattattaagtataatagacgactagctaagtctattatttgcaaggatgactctcaaattattacactcacggcattcgttaaccaatgcctatggtgtcataaacgagtatccgtgtccgctattttattaactactgataacaaaatattagtatgtaacagacgagatagttttctctattctgaaataattagaactagaaacatgtttagaaagaaacgattatttctgaattattccaattatttgtccaaacaggaaagaagtatactatcgtcatttttttctctatatccagctactgctgataatgatagaatagacgctatttatccgggtggcatacccaaaaggggtgagaatgttccagagtgtctatccagggaaatcaaagaagaagttaatatagacaattcttttgtattcatagacactcggttttttattcatggtatcatagaagataccattatcaacaaattttttgaggtaattttctttgtcggaagaatatctctaacgagtgatcaaattattgatacctttaaaagtaatcatgaaatcaaggatctaatatttttagatccgaattcaggtaatggactccaatacgaaattgcaaaatatgctctagatactgcaaaacttaaatgttacggccatagaggatgttattatgaatcattaaaaaaattaactgaggatgattgattagaaaatataaattaatttaccatcgtgtatttttataacgggattgtccggcatatcatgtagatagttaccgtctacatcgtatactcgaccatctacgcctttaaatcctctatttattgacattaatctattagaattggaataccaaatattagtaccctcaattagtttattggtaatattttttttagacgatagatcgatggctcttgaaaccaaggttttccaaccggactcattgtcgatcggtgagaagtctttttcattagcatgaatccattctaatgatgtatgtttaaacactctaaacaattggacaaattcttttgatttgctttgaatgatttcaaataggtcttcgtctacagtaggcataccattagataatctagccattataaagtgcacgtttacatatctacgttctggaggagtaagaacgtgactattgagacgaatggctcttcctactatctgacgaagagacgcctcgttccatgtcatatctaaaatgaagatatcattaattgagaaaaaactaataccctcgcctccactagaagagaatacgcatgttttaatgcattctccgttagtgtttgattcttggttaaactcagccaccgccttgattctagtatcttttgttctagatgagaactctatattagagataccaaagactttgaaatatagtaataagatttctattcctgactgattaacaaatggttcaaagactagacatttaccatgggatgctaatattcccaaacatacatctataaatttgacgcttttctcttttaattcagtaaatagagagatatcagccgcactagcatcccctttcaatagttctccctttttaaaggtatttaatgcggatttagaaaactctctatctcttaatgaatttttaaaatcattatatagtgttgctatctcttgcgcgtattcgccgggatcacgattttgtctttcaggaaagctatcgaacgtaaacgtagtagccatacgtctcagaattctaaatgatgatataccagtttttatttctgcgagtttagccttttgataaatctcttcttgcttttttgacatattaacgtatcgcattaatactgttttcttagcgaatgatgcagacccttctacgttatcaaaaatagaaaactcgttattaactatgtacgaacataggcctcctagtttggagactaattctttttcatcgactagacgtttattctcaaatagtgattggtgttgtaaggatcctggtcgtagtaagttaaccaacatggtgaattcttgcacactattgacgataggtgtagccgataaacaaatcatcttatggttttttaatgcgatggtcttggataaaaaattatatactgaacgagtaggacggatcttaccatcttctttgattaatgatttagaaatgaagttatgacattcatcaataatgacgcatattctactcttggaattaatagttttgatattagtaaaaaatttatttctaaaattttgatcatcgtaattaataaaaatacaatccttcgttatctctggagcgtatctgagtatagtgttcatccaaggatcttctatcaaagcctttttcaccaataagataatagcccaattcgtataaatatccttaagatgtttgagaatatatacagtagtcattgttttaccgacacccgtttcatggaacaataaaagagaatgcatactgtctaatcctaagaaaactcttgctacaaaatgttgataatccttgaggcgtactacgtccgaccccatcatttcaacgggcatattagtagttctgcgtaaggcataatcgatataggccgcgtgtgatttactcatttatgagtgataagtaataactatgttttaaaaatcacagcagtagtttaactagtcttctctgatgtttgttttcgatactttttgaatcagaagtcatactagaataaagcaacgagtgaacgtaatagagagcttcgtatactctattcgaaaactctaagaacttattaatgaattccgtatccactggattgtttaaaatactaaattgaacactgttcacatccttccaagaagaagacttagtgacggacttaacatgagacataaataaatccaaattttttttacaaacatcactagccaccataatggcgctatctttcaaccagctatcgcttacgcattttagcagtctaacatttttaaagagactacaatatattctcatagtatcgattacacctctaccgaataaagttggaagtttaataatacaatatttttcgtttacaaaatcaaataatggtcgaaacacgtcgaaggttaacatcttataatcgctaatgtatagattgttttcagtgagatgattattagatttaatagcatctcgttcacgtttgaacagtttattgcgtgcgctgaggtcggcaactacggcgtccgctttagtactcctcccataatactttacgctattaatctttaaaatttcatagactttatctagatcgctttctggtaacatgatatcatgtgtaaaaagttttaacatgtcggtcggcattctatttagatcattaactctagaaatctgaagaaagtaattagctccgtattccagactaggtaatgggcttttacctagagacagattaagttctggcaatgtttcataaaatggaagaaggacatgcgttccctcccggatattttttacaatttcatccatttacaactctatagtttgttttcattattattagttattatctcccataatcttggtaatacttaccccttgatcgtaagataccttatacaggtcattacatacaactaccaattgtttttgtacataatagattggatggttgacatccatggtggaataaactactcgaacagatagtttatctttccccctagatacattggccgtaatagttgtcggcctaaagaatatctttggtgtaaagttaaaagttagggttcttgttccattattgctttttgtcagtagttcattataaattctcgagatgggtccgttctctgaatatagaacatcatttccaaatctaacttctagtctagaaataatatcggtcttattcttaaaatctattcccttgatgaagggatcgttaatgaacaaatccttggcctttgattcggctgatctattatctccgttatagacgttacgttgactagtccaaagacttacaggaatagatgtatcgatgatgttgatactatgtgatatgtgagcaaagattgttctcttagtggcatcactatatgttccagtaatggcggaaaactttttagaaatgttatatataaaagaattttttcgtgttccaaacattagcagattagtatgaagataaacactcatattatcaggaacattatcaatttttacatacacatcagcatcttgaatagaaacgataccatcttctggaacctcaacaatctcggcagactccggataaccagtcggtggaccatcgctaacaataactagatcatccaacaatctactcacatatgcatctatataatctttttcatcttgtgagtaccctggatacgaaataaatttattatccgtatttccataataaggtttagtataaacagagagcgatgttgccgcatgaacttcagttacagtcgccgttggttggtttatttgacctattactctcctaggtttctctataaacgatggtttaatttgtacattcttaaccatatatccaataaagctcaattcaggaacataaacaaattctttgttgaacgtttcaaagtcgaacgaagagtcacgaataacgatatcggatactggattgaaggttaccgttacggtaatttttgaatcggatagtttaagactgctgaatgtatcttccacatcaaacggagttttaatataaacgtatactgtagatggttctttaatagtgtcattaggagttaggccaatagaaatatcattaagttcactagaatatccagagtgtttcaaagcaattgtattattgatacaattattatataattcttcgccctcaatttcccaaataacaccgttacacgaagagatagatacgtgattaatacatttatatccaacatatggtacgtaaccgaatcttcccatacctttaacttctggaagttccaaactcagaaccaaatgattaagcgcagtaatatactgatccctaatttcgaagctagcgatagcctgattgtctggaccatcgtttgtcataactccggatagagaaatatattgcggcatatataaagttggaatttgactatcgactgcgaagacattagaccgtttaatagagtcatccccaccgatcaaagaattaatgatagtattattcattttctatttaaaatggaaaaagcttacaataaactccgtagagaaatatctataatttgtgagttttccttaaagtaacagcttccgtaaacgccgtctttatctcttagtaagtttattgtatttataaccttttccttatcttcatagaatactaaaggcaacaaagaaatttttggttcttctctaagagctacgtgagacttaaccatagaagccaacgaatccctacatattttagaacagaaataccctacttcaccacccttgtatgtctcaatactaataggtctaaaaaccaaatcttgattacaaaaccaacacttatcaattacactatttgtcttaatagacacatctgccatagatttataatactttggtagtatacaagcgagtgcttcttctttagcgggcttaaagactgctttaggtgctgaaataaccacatctggaaggcttactcgcttagccatttaattacggaactatttttttatacttctaatgagcaagtagaaaacctctcatctacaaaaacatactcgtgtccataatcctctaccatagttacacgttttttagatctcatatgtgctaaaaagttttcccatactaattggttactattatttttcgtataatttttaacagtttgaggttttagatttttagttacagaagtgatatcgaatattttatccaaaaagaatgaataattaattgtcttagaaggagtgttttcttggcaaaagaataccaagtgcttaaatatttctactacttcattaatcttttctgtactcagattcagtttctcatcttttacttgattgattatttcaaagactaacttataatcctttttatttattctctcgttagccttaagaaaactagatacaaaatttgcatctacatcatccgtggatatttgatttttttccatgatatccaagagttccgagataatttctccagaacattgatgagacaataatctccgcaatacatttctcaaatgaataagtttattagacacgtggaagtttgactttttttgtacctttgtacatttttgaaataccgactcgcaaaaaatacaatattcatatccttgttcagatactataccgttgtgtctacaaccgctacataatcgtagattcatgttaacactctacgtatctcgtcgtccaatattttatataaaaacattttatttctagacgttgccagaaaatcctgtaatacttttagttttttgggctgtgaataaagtatcgccctaatatggttaccgtcctccgccaatatagtagttaaattatccgcacatgcaaaagaacaccgcttaggcggattcagtacaatgttatatttttcgtaccaactcatttaaatatcataatctaaaatagttctgtaatatgtctagcgctaatatattgatcataatcctgtgcataaattaagatacaacaatgtctcgaaatcatcgacatggcttcttccatagttagaagatcgtcgtcaaagttagcaacgtgattcatcaacatttgctgttttgaggcagcaaatactgaaccgtcgccattcaaccattcataaaaaccatcgtctgaatccattgataatttcttgtactggtttttgagagctcgcatcaatctagcatttctagctcccggattgaaaacagaaagaggatcgtacatccagggtccattttctgtaaatagaatcgtataatgtcccttcaagaagatatcagacgatccacaatcaaagaattggtctccgagtttgtaacaaactgcggactttaacctatacatgataccgtttagcataatttctggtgatacgtcaatcggagtatcatctattagagatctaaagccggtgtaacattctccaccaaacatattcttattctgacgtcgttctacataaaacatcattgctccattaacgataacaggggaatgaacagcactacccatcacattagttcccaatggatcaatgtgtgtaactccagaacatcttccatagcctatgttaggaggagcgaacaccactcttccactattgccatcgaatgccatagaataaatatccttggaattgatagaaatcggactgtcggatgttgtgatcatcttcataggattaacaacgatgtatggtgccgcctgaagtttcatatcgtaactgatgccgttcataggtctagccacagaaaccaacgtaggtctaaatccaactatagacaaaatagaagccaatatctgttcctcatctgtcataacttgagagcatccagtatgaataatcttcattagatggggatctaccgcatcatcatcgttacaataaaaaattcccattctaatgttcataattgcttttctaatcatggtatgcatgtttgctctctgaatctctgtggaaattagatctgatacacctgtaatcactatcggattatcctccgtaagacgattaaccaacaacatataattataagactttacttttctaaattcataaagttgctggattaggctataggtgtctccatgtacatacgcgttctcgagcgcaggaagtttaataccgaatagtgccatcagaataggatgaatatagtaattagtttctggttttctataaataaaagacaaatcttgtgaactagacatatcggtaaaatgcatggattggaatcgtgtagtcgacagaagaatatgatgattagatggagagtatattttatctaactctttgagttggtcaccgattctaggactagctcgagaatgaataagtactaaaggatgagtacatttcacagaaacactagcattgttcaatgtgctctttacatgggtaaggagttgaaatagctcgtttctatttgttctgacaatatttagtttattcataatgttaagcatatcctgaatagtaaagttagatgtgtcatacttgttagtagttagatatttagcaattgcattcccatcatttctcaatctcgtactccaatcatgcgtggatgctacttcgtcgatggaaaccatacaatcctttttgataggctgttgagattgattatttcctgcacgtttaggtttggtacgttgatttctagcccctgcggatataaagtcatcgtctacaatttgggacaatgaattgcatacactacaagacaaagatttatcagaagtgtgaatatgatcttcatctaccaaagaaagagtttgattagtataactagattttagtcctgcgttagatgttaaaaaaacatcgctattgaccacggcttccattatttatattcgtagtttttactcgaaagcgtgattttaatatccaatcttattacttttggaatcgttcaaaacctttgactagttgtagaatttgatctattgccctacgcgtatactcccttgcatcatatacgttcgtcaccagatcgtttgtttcggcctgaagttggtgcatatctttttcaacactcgacatgagatccttaagggccatatcgtctagattttgttgagatgctgctcctggatttggattttgttgtgctgttgtacatactgtaccaccagtaggtgtaggagtacatacagtggccacaataggaggttgaggaggtgtaaccgttggagtagtacaagaaatatttccatccgattgttgtgtacatgtagttgttggtaacgtctgagaaggttgggtagatggcggtgtcgtcgtcttttgatctttattaaatttagagataatatcctgaacagcattgctcggcgtcaacgctggaaggagtgaactcgccggcgcatcagtatctgcagacagccaatcaaaaagattagacatatcagatgatgtattagtttgttgtcgtggttttggtgtaggagcagtactactaggtagaagaataggagccgatgtaggtgtcggaaccggctgtggagttatatgaatagttggttgtagcggttggataggctgtctgctggcggccatcatattatctctagctagttgttctcgcaactgtctttgataatacgactcttgagactttagtcctatttcaatcgcttcatcctttttcgtatccggatccttttcttcagaataatagattgacgactttggtgtagaggattctgccagcccctgtgagaacttgttaaagaagtccatttaaggctttaaaattgaattgcgattataagattaaatggcagacacagacgatattatcgactatgaatccgatgatctcactgaatacgaggatgatgaagaagaggaagaagatggagagtcactagaaactagtgatatagatcccaaatcttcttataagattgtagaatcagcatccactcatatagaagatgcgcattccaatcttaaacatatagggaatcatatatctgctcttaaacgacgctatactagacgtataagtctatttgaaatagcgggtataatagcagaaagctataacttgcttcaacgaggaagattacctctagtttcagaattttctgacgaaacgatgaagcaaaatatgctacatgtaattatacaagagatagaggagggttcttgtcctatagtcatcgaaaagaacggagaattgttgtcggtaaacgattttgacaaagatggtctaaaattccatctagactatattatcaaaatttggaaacttcaaaaacgatattagaatttatacgaatatcgttctctaaatgtcacaatcaagtctcgcatgttcagcaatttattgtcgtactttatatcgtgttcattaacgatatcttgcaaaatagtaatgattctatcttccttcgatagatattcttcagagattattgtcttatattctttcttgttatcagatatgaatttgataagactttgaacattattgatacccgtctgtttaattttttctacagatattttagttttggcagattctatcgtatctgtcaatagacatccaacatcgacattcgacgtcaattgtctataaatcaacgtataaattttagaaataacattagcgaattgttgtgcattgatgtcgttattctgaaacagtatgattttaggtagcattttcttaacaaagagaacgtatttattgttactcagttgaacagatgatatatccagattactaacgcatctgattccgtataccaaactttcagaagaaatggtatacaattgtttgtattcattcaatgtctctttttcagaaattagtttagagtcgaatactgcaataattttcaagagatagttttcatcagataagattttatttagtgtagatatgataaaactattgttttgttggagaacttgatacgccgcgttctctgtagtcgacgctctcaaatgggaaacgatctccattatttttttggaatcggatactatatcttcggtatcttgacgcagtctagtatacatagagttaagagagattagagtttgtacattaagcaacatgtctctaaatgtggctacaaacttttccttttccacatcatctagtttattatataccgatttcacaacggcaccagatttaaggaaccagaatgaaaaactctgataactacaatatttcatcatagttacgattttatcatcttctatagttggtgtaatagcgcatacctttttctccaagactggaaccaacgtcataaaaatgtttaaatcaaaatccatatcaacatctgatgcgctaagaccagtctcgcgttcaagattatctttactaatggtgacgaactcatcgtatagaactctaagtttgtccattatttatttacagatttagttgtttaatttatttgtgctcttccagagttgggatagtatttttctaacgtcggtattatattattaggatctacgttcatatgtatcataatattaatcatccacgttttgataaatctatctttagcttctgaaataacgtatttaaacaaaggagaaaaatatttagctacggcatcagacgcaataacattttttgtaaatgtaacgtatttagacgacagatcttcgttaaaaagttttccatctatgtagaatccatcagttgttaacaccattcccgcgtcagattgaataggagtttgaatagtttgttttggaaatagatccttcaataacttatagttgggtgggaaaaaatcgattttatcactagactctttcttttttactatcattacctcatgaactatttcttgaatgagtatatgtattttctttcctatatcggacgcgttcattggaaaatataccatgtcgttaactataagaatatttttatcctcgtttacaaactgaataatatcagatgtagttcgtaaacgaactatatcatcaccagcacaacatctaactatatgatatccactagtttcctttagtcgtttattatcttgttccatattagcagtcattccatcatttaagaaggcgtcaaagataatagggagaaatgacattttggattctgttacaactttaccaaaattaaggatatacggacttactatctttttctcaacgtcaatttgatgaacacacgatgaaaatgtacttcgatgagattgatcatgtagaaaacaacaagggatacaatatttccgcatatcatgaaatatattaagaaatcccaccttattatatttccccaaaggatccatgcacgtaaacattatgccgttatcattaataaagacttctttctcatcggatctgtaaaagttgttactgatttttttcattccaggatctagataattaataatgatgggttttctattcttattctttgtattttggcatatcctagaccagtaaacagtttccactttggtaaaatcagcagacttttgaacgctattaaacatggcattaatggcaataactaaaaatgtaaaatatttttctatgttaggaatatggtttttcactttaatagatatatggtttttggccaaaatgatagatatttttttatccgaggatagtaaaatattattagtcgccgtctctataaaaatgaagctagtctcgatatccaattttattctagaattgataggagtcgccaaatgtaccttatacgttatatctcccttgatgcgttccatttgtgtatctatatcggacacaagatctgtaaatagttttacgttattaatcatcacggtatcgccgtcgctagataatgctaatgtaccatccaagtcccaaatggagagatttaactgttcatcgtttagaataaaatgattaccggtcatattaataaagtgttcatcgtatctagataacaacgacttataattaatgtccaagtcttgaactcgctgaatgatcttttttaacccagttagttttagattggtacgaaatatattgttaaactttgattctacagtaatgtccaaatctagttgtggaaatacttccatcaacattgtttcaaacttgataatattattatctacatcttcatacgatccaaattccggaatagatgtatcacatgctcttgccacccagataaccaaaaagtcacacgctccaggatatacattgtataaaaagctatcgtttttaagtagggtttttttctgcgtgtatacgaagggattaaaaatagtattatcaacgtaactatattccaaattattcttatgagaatagataataatatcgtccttaatatctaacaaatttcctaaatatccctttaattgagtcattcgaagcgtcaatagaatatgtctcttaactatttccggctgttgtatatttaaatgacttcgtaaaaaataatatatgggcgacttctcatctatgtaatcatatggagtgagatatagggctcgttctacctcctgccccttacccacctgtaataccaattgcggacttactatatatcgcatatttatatcgtggggtaaagtgaaaatctactaccgatgatgtaagtcttacaatgttcgaaccagtaccagatcttaatttggaggcctccgtagaactaggggaggtaaatatagatcaaacaacacctatgataaaggaaaatagcggttttatatcccgtagtagacgtctattcgcccatagatctaaggatgatgagagaaaactagcactacgattctttttacaaagactttattttttagatcatagagagattcattatttgttcagatgcgttgacgctgtaaaagacgtcactattaccaaaaaaaataacattatcgtggcgccttatatagcacttttaactatcgcatcaaaaggatgcaaacttacagaaacaatgattgaagcattctttccagaactatataatgaacatagtaagaaatttaaattcaactctcaagtatccatcatccaagaaaaactcggataccagtttggaaactatcacgtttatgattttgaaccgtattactctacagtagctctggctattcgagatgaacattcatctggcatttttaatatccgtcaagagagttatctggtaagttcattatctgaaataacatatagattttatctaattaatctaaaatctgatcttgttcaatggagtgctagtacgggcgctgtaattaatcaaatggtaaatactgtattgattacagtgtatgaaaagttacaactggtcatagaaaatgattcacaatttacatgttcattggctgtggaatcagaacttccaataaaattacttaaagatagaaatgaattatttacaaaattcatcaacgagttaaaaaagaccagttcattcaagataagcaaacgcgataaggatacgctactaaaatattttacttaggactggagttagaatttatagacgactcatttcgtttatcattattactaccatcattattagtattcttcttgttatcttgttcagaaatatacagcaatgctatgcctaatactaaatacattatcatgcttgcaatggctctaacaacgacgaaccaaaatgaatttggtcgtagcttttgttcacaaaaatacataaagaaatgtctacataaatctatggcgccattggctacttgaaatagcgccagtcctcctacagattttaatatagctgtataacatgacatttattcatcatcaaaagagacagagtcaccatctgtcatatttagattttttttcatgtgttcaaagtatcctctactcatttcattataatagtttatcatacttagaattttaggacggatcaatgagtaagacttgactagatcgtcagtagtaatttgtgcatcgtctattctgcatccgcttcgtcgaataatgtatagcatcgctttgagattctccatagctatcaagtctttatacaatgacatggaaatatctgtgaatactttatacttctccaacatcgatgccttaacatcatcgcctactttagcattgaaaatacgttctattgtgtagatggatgtagcaagatttttaaacaacaatgccatcttacacgatgattgcctcaagtctccaatcgtttgtttagaacgattagctacagagttcaacgcttggctgactagcatattattatctttagaaattgtattcttcaatgaagcgtttatcatatctgtgatttcgttagtcatattacagtctgactgggttgtaatgttatccaacatatcacctatggatacggtacacgtaccagcatttgtaataatcctatctaagatgttgtatggcattgcgcagaaaatatcttctcctgtaatatctccactctcgataaatctactcagattattcttaaatgccttattctctggagaaaagatatcagtgtccatcatttcattaatagtatacgcagaaaagataccacgagtatcaattctatccaagatacttatcggttccgagtcacagataatggtttcctctccttcgggagatcctgcatagaaatatctaggacaatagtttctatactgtctgtaactctgataatctctaaagtcactaactgataccatgaaattgagaagatcaaacgctgaagtaatcaatttttctgcctcgtttttactacaactagttttcatcaatgtagtgacgatgtattgtttagttactcttggtctaatactgatgatagagatattattacttcccataatggatcttctagtagtcaccttaaagcccattgatgcaaatagcagatagataaagtcttggtatgactcctttctaatatagtacggactacctttgtcacccaactttatacccacataagccataacaacctctttaatagccgtttcatgaggtttatcagccatgagcctgagtagttggaagaatctcatgaatcccgtctcagaaagtcctatatgcatgatagatttatctttcctgggaaactctcgtatagtcatagatgaaatactcttcaaagtttctgaaataagattagtaacagtcttacctccgactactctgggtaacaaacatactctaataggtgttttctctgcggagataatatcagaaaggatagagcaataagtagtattattgtgattataaagaccgaatacataacaggtagaatttataaacatcatgtcctgaaggtttttagacttgtattcctcgtaatccataccgtcccaaaacatggatttggtaactttgatagccgtagatctttgttccttcgccaacaggttaaagaaattaataaagaatttgttgtttctatttatgtccacaaattgcacgtttggaagcgtaactgttacgttcactgcagcattttgaggatcgcgagtatgaagtacgatgttattgtttactggtatatctggaaagaaatctaccagtctaggaataagagattgatatcgcatagaaatagtaaagtttataatctcatcatcgaagagcattttgttaccattgtaataaatatccactctgtcatatgtataaatgaagtactgttcaaacatgatgagatgtttatatgttggcatagtagtgagatcgacgtttggtaatggcaatgtattaagattaactccataatgtctagcagcatctgcgatgttataagtgtcgtcaaagcggggtcgatcttgtgctgttatatattgtctaacacctataagattatcaaaatcttgtctgcttaatacaccgttaacaatttttgccttgaattcttttattggtgcattaataacatccttatagaggatgttaaacaaataagtgttatcaaagttaagatctggatatttcttttctgctagaacatccattgagtcggagccatctggtttaatataaccaccgataaatctagctctgtattctgtatccgtcaatctaatattaagaaggtgttgagtgaaaggtggaagatcgtaaaagctgtgagtattaatgataggattagtttccgaactaatgttaattggggtattaataatatctatatttccagcgttaagtgtaacattaaacagttttaattcacgtgacgtggtatcaattaaataattaatgcccaatttggatatagcagcctgaagctcatcttgtttagttacggatcctaatgagttattaagcaatatatcgaacggatgaacgaaggttgttttaagttggtcacatactttgtaatctagacatagatgcggaagaacggtagaaactatacgaaataaatattcagagtcctctaattgatcaagagtaactattgacttaataggcatcatttatttagtattaaatgacgaccgtaccagtgacggatatacaaaacgatttaattacagagttttcagaagataattatccatctaacaaaaattatgaaataactcttcgtcaaatgtctattctaactcacgttaacaacgtggtagatagagaacataatgccgccgtagtgtcatctccagaggaaatatcctcacaacttaatgaagatctatttccagatgatgattcaccggccactattatcgaacgagtacaacctcatactactattattgacgatactccacctcctacttttcgtagagagttattaatatcggaacaacgtcaacaacgagaaaaaagatttaatattacagtatcgaaaaatgctgaagcaataatggaatctagatctatgataacttctatgccaacacaaacaccatccttgggagtagtttatgataaagataaaagaattcagatgttagaggatgaagtggttaatcttagaaatcaacgatctaatacaaaatcatctgataatttagataattttaccaaaatactatttggtaagactccgtataaatcaacagaagttaataagcgtatagccatcgttaattatgcaaatttgaacgggtcccccttatcagttgaggacttggatgtttgttcggaggatgaaatagatagaatctataaaacgattaaacaatatcacgaaagtagaaaacgaaaaattatcgtcactaacgtgattattattgtcataaacattatcgagcaggcattgctaaaactcggatttgaagaaatcaaaggactgagtaccgatatcacttcagaaattatcgatgtggagatcggagatgactgcgatgctgtagcatctaaactaggaatcggtaacagtccggttcttaatattgtattgtttatactcaagatattcgttaaacgaattaaaattatttaatttaatacattcccatatccagacaacaatcgtctggattaatctgttcctgtcgtctcataccggacgacatattaatctttttattagtaggcatctttttagatggtttctttttcccagcattaactgagtcgatacctagaagatcgtgattgatctctccgaccattccacgaacttctaattggccgtctctgacggtaccataaactattttaccagcattagtaacagcttggacaatctgaccatccattgcgttgaatgatgtagttgctgttgttctacgtttaggagcaccagaagtatttttggagcccttggaggctgatgtagaagaagacgaggattttgatttacatgtaatacattttgtactctttgattttgtatcacatgcgccggcagtcacatttgtttgagaattaagattattgttgcctcctttgacggctgcatctccaccgatttgcgctagtagatttttaagctgtggtgtaatcttattaactgtttcgatataatcatcgtaactgcttctaacggctaaattttttttatccgccatttagaagctaaaaatatttttatttatgcagaagatttaactagattatacaatgaactaatatgatccttttccagattatttacaaacttggtattttttggttctggaggaggcgaatttaaattcggacttggattcggattttgtgagttcttgatcttattatacatcgagtataggatggcgacggtaactgctacgcaaataccgatcaacaaaagaataccaatcatttattgacaataacttcactattgatcaagtatgcaatatatcatcttttcactaaataagtagtaataatgattcaacaatgtcgagatatatggacgataataatttagttcatggaaatatcgctatgattggtatgaatgactccgctaactctgtggggtgcgcagtgctttccccacatagaataaattagcattccgactgtgataataataccaagtataaacgccataatactcaatactttccatgtacgagtgggactggtagacttactaaagtcaataaaggcgaagatacacgaaagaatcaaaagaatgattccagcgattagcacgccggaaaaataatttccaatcataagcatcatgtccatttaactaataaaaattttaaatcgccgaatgaacaaagtggaatataaaccatataaaaacaatagtttgtactgcaaaaataatatctatttttgttttcgaagatatggtaaaattaaatagtagtacacagcatgttataactaacagcagcaacggctcgtaattacttatcatttactagacgaaaaggtggtgggatattttcttgctcaaataatacgaatatatcacccatccattttatgcgatgtttatatactctaatctttaatagatctatagacgacgggtttaccaacaatatagattttatcgattcatctaatttaaacccttccttaaacgtgaatgatctattatctggcataacgatgactctacctgatgaatcggacaatgtactgggccatgtagaataaattatcaacgaattatcgtctacgaacatttatatcatttgttttaattttaggacgcgaataaatggatataaaatagaaaataacagatattacaaccaatgttatggccgcgcccaaccaggtaggcagttttattttatcttttactacaggttctcctggatgtacgtcaccaacggcggacgtagttctagtacaattagacgtaagttctgcttgggaattttttaacgctaaagagttaacgttaatcgtgcacccaacgtatttacatctagttctttgaacatcttgattataatataaccattttctatctctagattcgtcggtgcactcatgtaaccaacataccctaggtcctaaatatttatctccggaattagattttggataattcgcgcaccaacaatttctatttcctttatgatcgttacaaaagacgtataatgccgtatccccaaaagtaaaataatcaggacgaataattctaataaactcagaacaatatctcgcatccatatgtttggagcaaatatcggaataagtagacatagccggtttccgttttgcacgtaaccattctaaacaattggggtttccaggatcgtttctacaaaatccagtcatgaaatcatcacaatgttctgtcttgtaattattattaaatatttttggacagtgtttggtatttgtcttagaacaacattttgccacgctatcactatcgcccaggagataatccttttttataaaatgacatcgttgcccggatgctatataatcagtggcgtgttttaaatccttaatatattcaggagttacctcgttctgataatagattaatgatccaggacgaaatttgaaagaactacatggttctccatgaattaatacatattgtttagcaaattcaggaactataaaactactacaatgatctatcgacataccatctatcaaacaaaacttgggtttaatttctcccggagatgtttcataatagtacgtataactttcttctgcaaacttaacagctctattatattcaggataattaaaacctaattccatatatttgtctcgtatatctgctattcctggtgctattttaattctattaagagtaacggctgcccccattcttaataatcgtcagtatttaaactgttaaatgttggtatatcaacatctaccttatttcccgcagtataaggtttgttgcaggtatactgttcaggaatggttacatttatacttcttctatagtcctgtctttcgatgttcatcacatatgcaaagaacagaataaacaaaataatgtaagaaataatattaaatatctgtgaattcgtaaatacattgattgccataataattacagcagctacaatacatacaatagacattcccacagtgttgccattacctccacgatacatttgagttactaagcaataggtaataactaagctagtaagaggcaatagaaaagatgagataaatatcatcaatatagagattagaggagggctatatagagccaagacgaacaaaatcaaaccgagtaacgttctaacatcattatttttgaagattcccaaataatcattcattcctccataatcgttttgcattatacctccatctttaggcataaacgattgctgctgttcctctgtaaataaatctttatcaagcactccagcacccgcagagaagtcgtcaagcatattgtaatatcttaaataactcatttatatattaaaaaatgtcactattaaagatggagtataatctttatgccgaactaaaaaaaatgacttgtggtcaacccctaagtctttttaacgaagacggggatttcgtagaagttgaaccgggatcatcctttaagtttctgatacctaagggattttacgcctctccttccgtaaagacgagtctagtattcgagacattaacaacgaccgataataaaatcactagtatcaatccaacaaatgcgccaaagttatatcctcttcaacgcaaagtcgtatctgaagtagtttctaatatgaggaaaatgatcgaatcaaaacgtcctctatacattactcttcacttggcgtgtggatttggtaagactattaccacgtgttatcttatggctacacacggtagaaaaaccgtcatttgcgtacccaataaaatgttaatacatcaatggaagacacaggtagaggcagtcggattggaacataagatatctatagatggagtaagtagtctattaaaggaactaaagactcaaagtccggatgtattaatagtagtcagtagacatctgacaaacgatgccttttgtaaatatatcaataagcattatgatttgttcatcttggatgaatcacatacgtataatctgatgaacaatacagcagttacaagatttttagcgtattatcctccgatgatgtgttattttttaactgctacacctagaccagctaaccgaatttattgtaacagtattattaatattgccaagttatccgatctaaaaaaaactatctatgcggtagatagtttttttgagccatattccacagacaatattagacatatggtaaaacgactagatggaccatctaataaatatcatatatatactgagaagttattatctgtagacgagcctagaaatcaacttattcttgataccctggtagaagaattcaagtcaggaactattaatcgaattttagttattactaaactacgtgaacatatggtattcttctacaaacgattattagattttttcggatcagaggttgtatttataggagacgcccaaaatagacgtactccagatatggtcaaatcaatcaaggaactaaatagatttatattcgtatccaccttattttattccggtactggtttagatattcctagtttggattcgttgttcatttgctcggcagtaatcaacaatatgcaaatagagcaattactagggagggtatgtcgagaaacagaactattagataggacggtatatgtatttcctaacacatccatcaaagaaataaagtacatgataggaaatttcatgcaacgaattattagtctgtctgtagataaactaggatttaaacaaaaaagttatcggaaacatcaagaatccgatcccacttctgtatgtacaacatcctccagagaagaacgtgtattaaatagaatatttaactcgcaaaatcgttaagaagtttaagcgacgatccgcatgctgcgcaggccagtgtattacccctcatagtattaatataatccaatgatacttttgtgatgtcggaaatcttaaccaatttagactgacaggcagaacacgtcatgcaatcatcatcgtcatcgataactgtagtcttgggcttctttttgcggctcttcattccggaacgcacattggtgctatccatttaggtagtaaaaaataagtcagaatatgccctatagcacgatcgtgcaaaacctggtatatcgtctctatctttatcacaatatagtgtatcgacatttttattattattgacctcgtttatcttggaacatggaatgggaacatttttgttatcaacggccatctttgccttaattccagatgttgtaaaattataactaaacagtctatcatcgacacaaatgaaattcttgtttagacgtttgtagtttacgtatgcggctcgttcgcgtctcattttttcagatattgcaggtactataatattaaaaataagaatgaaataacataggattaaaaataaagttatcatgacttctagcgctgatttaactaacttaaaagaattacttagtctgtacaaaagtttgaaattttcagattctgcggctatagaaaagtataattctttggtagaatggggaacatctacttactggaaaataggcgtgcaaaaggtagctaatgtcgagacgtcaatatctgattattatgatgaggtaaaaaataaaccgtttaatattgatccgggatattacattttcttaccggtatattttggaagcgtctttatttattcgaagggtaaaaatatggtagaacttggatctggaaactcttttcaaataccagatgatatgcgaagtgcgtgtaacaaagtattagacagcgataacggaatagactttctgagatttgttttgttaaacaatagatggataatggaagatgctatatcaaaatatcagtctccagttaatatatttaaactagctagtgagtacggattaaacatacccaaatatttagaaattgaaatagaggaagacacattatttgacgacgagttatactctattatagaacgctctttcgatgataaatttccaaaaatatccatatcgtatattaagttgggagaacttagacggcaagttgtagactttttcaaattctcgttcatgtatattgagtccatcaaggtagatcgtataggagataatatttttattcctagcgttataacaaaatcaggaaaaaagatattagtaaaagatgtagaccatttaatacgatccaaggttagagaacatacatttgtaaaagtaaaaaagaaaaacacattttccattttatacgactatgatggaaacggaacagaaactagaggagaagtaataaaacgaattatagacactataggacgagactattatgttaacggaaagtatttctctaaggttggtagtgcaggcttaaagcaattgactaataaattagatattaatgagtgcgcaactgtcgatgagttagttgatgagattaataaatccggaactgtaaaacgaaaaataaaaaaccaatcagcatttgatttaagcagagaatgtttgggatatccagaagcggattttataacgttagttaataacatgcggttcaaaatagaaaattgtaaggttgtaaatttcaatattgaaaatactaattgtttaaataacccgagtattgaaactatatatggaaactttaaccagttcgtctcaatctttaatatcgtcaccgatgtcaaaaaaagattattcgagtgaaataatatgcgcctttgatataggtgcaaaaaatcctgccagaactgttttagaagtcaaggataactccgttagggtattggatatatcaaaattagactggagttctgattgggaaaggcgcatagctaaagatttgtcacaatatgaatacactacagttcttctagaacgtcagcctagaaggtcgccgtacgtcaaatttatctattttattaaaggctttttatatcatacatcggctgccaaagttatttgcgtctcgcctgtcatgtctggtaattcatatagagatcgaaaaaagagatcggtcgaagcatttcttgattggatggacacattcggattgcgagactccgttccggatagacgcaaattagacgatgtagcggatagtttcaatttggctatgagatacgtattagataaatggaatactaattatacaccttataataggtgtaaatctagaaattacataaaaaaaatgtaataacgttagtaacgccattatggataatctatttacctttctacatgaaatagaagatagatatgccagaactatttttaactttcatctaataagttgcgatgaaataggagatatatatggtcttatgaaagaacgcatttcctcagaggatatgtttgataatatagtgtataataaagatatacatcatgccattaagaaactagtgtattgcgacatccaacttactaaacacattattaatcagaatacgtatccggtatttaacgattcttcacaagtgaaatgttgtcattatttcgacataaactcagataatagcaatattagctctcgtacagtagagatatttgagagggaaaagtcatctcttgtatcatatattaaaactaccaataagaagagaaaggtcaattacggcgaaataaagaaaactgttcatggaggcactaatgcaaattacttttccggtaaaaagtctgacgagtatctgagtactacagttagatccaacattaatcaaccttggatcaaaaccatctctaagaggatgagagttgatatcattaatcactctatagtaacgcgtggaaaaagctctatattacaaactatagaaattatttttactaatagaacatgtgtgaaaatattcaaggattctactatgcacattattctatccaaggacaaggatgaaaaggggtgtatacacatgattgacaaattattctatgtctattataatttatttctgttgttcgaggatatcatccaaaacgagtactttaaagaagtagctaatgttgtaaaccacgtacttacggctacggcattagatgagaaattattcctaattaagaaaatggctgaacacgatgtttatggagttagcaatttcaaaatagggatgtttaacctgacatttattaagtcgttggatcataccgttttcccctctctgttagatgaggatagcaaaataaagttttttaaggggaaaaagctcaatattgtagcattacgatctctggaggattgtataaattacgtgactaaatccgagaatatgatagaaatgatgaaggaaagatcgactattttaaatagcatagatatagaaacggaatcggtagatcgtctaaaagaattgcttctaaaatgaaaaaaaacactgattcagaaatggatcaacgactcggatataagtttttggtgcctgatcctaaagccggagttttttatagaccgttacatttccaatatgtatcgtattctaattttatattgcatcgattgcatgaaatcttgaccgtcaagcggccactcttatcgtttaagaataatacagaacgaattatgatagaaattagcaatgttaaagtgactcctccagattactcacctataatcgcgagtattaaaggtaagagttatgacgcattagccacgttcactgtaaatatctttaaagaggtaatgaccaaagagggtatatccatcactaaaataagtagttatgagggaaaagattctcatttgataaaaattccgctactaataggatacgggaataaaaatccacttgatacagccaagtatcttgttcctaatgtcataggtggagtctttatcaataaacaatctgtcgaaaaagtaggaattaatctagtagaaaagattacaacatggccaaaatttagggttgttaagccaaactcattcactttctcgttttcctccgtatcccctcctaatgtattaccgacaagatatcgccattacaagatatctctggatatatcacaattggaagcgtcgaatatatcatcgacaaagacatttataacggtcaatattgttttgctgtctcaatatttatctagagtgagtctagaattcattagacgtagcttatcatacgatatgcctccagaagttgtctatctagtaaacgcgataatagatagtgctaaacgaattactgaatctattactgactttaatattgatacatacattaatgacctggtggaagctgaacacattaaacaaaaatctcagttaacgatcaacgagttcaaatatgaaatgctgcataactttttacctcatatgaactatacacccgatcaactaaagggattttatatgatatctttactaagaaagtttctctactgtatctaccacacttctagatatccagatagagattcgatggtttgtcatcgtatactaacatacggcaaatattttgagacgttggcacatgatgaattagagaattacataggcaacatccgaaacgatatcatgaacaatcacaagaacagaggcacttacgcggtaaacattcatgtactaacaactcctggacttaatcatgcattttctagtctattgagtggaaagttcaaaaagtcagacggtagttatcgaacacatcctcactattcatggatgcagaatatttctattcctaggagtgttggattttatccggatcaagtaaagatttcaaagatgttttctgtcagaaaataccatccaagtcaatatctttacttttgttcatcagacgttccggaaagaggtcctcaggtaggtttagtatctcaattgtctgtcttgagttccattacaaatatactaacgtctgagtatttggatttggaaaagaaaatttgtgagtatatcagatcatattataaagatgatataagttactttgaaacaggatttccaatcactatagaaaatgctctagtcgcatctcttaatccaaatatgatatgtgattttgtaactgactttagacgtagaaaacggatgggattcttcggtaacttggaggtaggtattactttagttagggatcacatgaatgaaattcgcattaatattggagcgggaagattagtcagaccattcttggttgtggataacggagagctcatgatggatgtgtgtccggagttagaaagcagattagacgacatgacattctctgacattcagaaagagtttccgcatgtcatcgaaatggtagatatagaacaatttacttttagtaacgtatgtgaatcggttcaaaaatttagaatgatgtcaaaggatgaaagaaagcaatacgatttatgtgactttcctgccgaatttagagatggatatgtggcatcttcattagtgggaatcaatcacaattctggacccagagctattcttggatgtgctcaagctaaacaagctatctcttgtctgagctcggatatacgaaataaaatagacaatggaattcatttgatgtatccagagaggccaatcgtgattagtaaggctttagaaacttcaaagattgcggctaattgcttcggccaacatgttactatagcattaatgtcgtacaaaggtatcaatcaagaggatggaattatcatcaaaaaacaatttattcagagaggcggtctcgatattgttacagccaagaaacatcaagtagaaattccattggaaaactttaataacaaagaaagagataggtctaacgcctattcaaaattagaaagtaatggattagttagactgaatgctttcttggaatccggagacgctatggcacgaaatatctcatcaagaactcttgaagatgattttgctagagataatcagattagcttcgatgtttccgagaaatataccgatatgtacaaatctcgcgttgaacgagtacaagtagaacttactgacaaagttaaggtacgagtattaaccatgaaagaaagaagacccattctaggagacaaatttaccactagaacgagtcaaaagggaacagtcgcgtatgtcgcggatgaaacggaacttccatacgacgaaaatggtatcacaccagatgtcattattaattctacatccatcttctctagaaaaactatatctatgttgatagaggttattttaacagccgcatattctgctaagccgtacaacaataagggagaaaaccgacctgtctgttttcctagtagtaacgaaacatccatcgatacatatatgcaattcgctaaacaatgttatgagcattcaaatccgaaattgtctgatgaagaattatcggataaaatcttttgtgaaaagattctctatgatcctgaaacggataagccttatgcatccaaagtattttttggaccaatttattacttgcgtctgagacatttaactcaggacaaggcaaccgttagatgtagaggtaaaaagacgaagctcattagacaggcgaatgagggacgaaaacgtggaggaggtatcaagttcggagaaatggagagagactgtttaatagcgcatggtgcagccaatactattacagaagttttgaaagattcggaagaagattatcaagatgtgtatgtttgtgaaaattgtggagacatagcagcacaaatcaagggtattaatacatgtcttagatgttcaaaacttaatctctctcctctcttaacaaaaattgataccacacacgtatctaaagtatttcttactcaaatgaacgccagaggcgtaaaagtcaaattagatttcgaacgaagacctccttcgttttataaaccattagataaagttgatctcaaaccgtcttttctggtctaatattgtttagtagatacttatcaacatcatcaagattatcaagattatcaagattatcaagataagctaattcactaaacacattatcgatttcggtatcgttactcgcagaataaagttcgttatgatcctgatattcggaaatctgtggagtttcaggttttggtggatgtgtaacagctacttgagataccgaagtctgatattcagaaagctgtggatgttctggttcggcatccaccgatggtgttacaccactactaattggttcagtaacgtctgtggacgatggaggcaccacttctacaggttctggttctttatcctcagtcatcaacggagctacttcaatgcgaggaaatgtataatttggtaatggtttctcatgtggatctgaagaagaggtaagatatctactagaaagataccgatcacgttctagttctcttttgtagaacttaactttttctttctcagcatctagttgatattccaacctcttcacgttactacgttcagatttcaattcacgttcgcatgggttacctccgcagtttttacgagcgatttcacgttcagccttcatgcgtctctccctctctctatcgagtttatcagagcagtctttctgaaggcgatcgaactccataaatttctccaacgctttgattgtttccatagatttccgaagttcagcttttaggactgtgattctttttctttcgaattcacagctggatgtacaaccgtttccattaccgccatctctaagtttcttttctagatcggcaacatttcatccccatgccttttacattcctcgagtctactgtcgtcgaaatatcgttccagctccttttcgacatcaataactttagcacgttgtctctcaagctctcttttgtagttatctgattccctggcacgtttaagatcttcatgcaattgagtcagctcttaacacaatctcttgcttcttcgtcatagtacgcgcaatcactgtgagatccattgttaccacgtctacactcggcgagctcgcgtttaagagattcaatttcccgtttgtattggtccatgtttccattgctaccaccattagatttacaggctgctagttgtcgttcgagatcagaaatacgggttttcttggaattgatttcgtcgatgtacttggcatcgaaacacttattaagttctttttccaattctacgattttatttctttcgcgagtcaattccctcctgtagtaactatctgttttgtcagattcacgctctctacgtagactttcttgcaagttactaatttgttccctagcacgtccgagtttagttttatatgctgaatagagttctgattcatcctttgagcagatctctagcgatcgtttaagattcctgattctagtctttagcctatttacctcctcagaagatgttccgttaccgttgcgtttacactcgttaagctgtctatcaagatccatgattctatctctaagacgttgcatctctctttccatatcagcattgctttcattattacgtctgcagtcactcaactgtctttcaatatctgagattctatctctaagacgtcgcatctctctctgtttcggcattggtttcattattacgtctacagtcgttcaactgtctttcaagatctgatattctagattggagtctgctaatctctgtagcattttcacggcattcactcagttgtctttcaagatctgaaattttagattggagtctgctaatctctgtaagatttcctcctccgctctcgatgcagtcggtcaacttattctctagttctctaatacgcgaacgcagtgcatcaacttcttgcgtgtcttcctggttgcgtgtacattcatcgagtctagattcgagatctctaacgcgtcgtcgttcttcctcaagttctctgcgtactacagaaagcgtgtccctatcttgttgatatttagcaatttctgattctagagtactgattttgcttacgtagttactaatatttgtcttggccttatcaagatcctccttgtatttgtcgcattccttgatatccctacgaagtctggacagttcccattcgacattacgacgtttatcgatttcagctcggagatcgtcatcgcgttgttttagccacatacgactgagttcaagttctcgttgacaagatccatctacttttccattcctaatagtatccagttccttttctagttctgaacgcatttctcgttccctatcaagcgattctctcaattctcggatagtcttcttatcaatttctaataaatctgaaccatcatctgtcccattttgaatatccctgtgttctttgatctcttttgtaagtcggtcgattctttcggttttataaacagaatccctttccaaagtcctaatcttactgagtttatcactaagttctgcattcaattcggtgagttttctcttggcttcttccaactctgttttaaactctccactatttccgcattcttcctcgcatttatctaaccattcaattagtttattaataactagttggtaatcagcgattcctatagccgttcttgtaattgtgggaacataattaggatcttctaatggattgtatggcttgatagcatcatctttatcattattagggggatggacaaccttaattggttggtcctcatctcctccagtagcgtgtggttcttcaatagccgtgttagtaataggcttaggcaaatgcttgtcgtacgcgggcacttcctcatccatcaagtatttataatcgggttctacgtctgaatattcttttctaagagacgcaacttctggagttagtagaagaactctgtttctatatctatcaacgctggaatcaatactcaagttaaggatagcgaatacctcatcgtcatcatccgtatcctctgaaacgccatcatatgacatttcatgaagtctaacgtattgataaacagaatcagatttagtattaaacagatccttaacctttttagtaaatgcatatgtatattttagatctccagatttcataatatggtcgcatgccttaaatgtcagtgcttccataatatagtctggaacactaattggtgatgaaaaagataccggaccatatgctacgttgataaataactctgagccactaactagataatgattaatgttaaggaagaggaaatattcagtgtataggtatgtcttggcgtcatatcttgtactaaacacgctaaacagtttgttaatgtgatcaatttccaatagattaattagagcagcaggaataccaacaaacatattaccacatccgtattttctatgaatatcacatatcatgttaaaaaatcttgatagaagagcgaatatctcgtctgacttaatgagtcgtagttcagcagcaacataagtcataactgtaaatagaacatactttcctgtagtgttgattctagactccacatcaacaccattattaaaaatagttttatatacatctttaatctgctctccgttaatcgtcgaacgttctagtatacggaaacactttgatttcttatctgtagttaatgacttagtgatatcacgaagaatattacgaattacatttcttgtttttcttgagagacctgattcagaactcaactcatcgttccatagtttttttacctcagtggcgaaatctttggagtgcttggtacatttttcaataaggttcgtgacctccatttattataaaaaaattttattcaaaacttaactacaatcgggtaattataaaatcgtagatctcccatgtggtggaatactaccatctatcgcatgtggatggacagtaggtaatggccatgggaacagtaatgtttgcatatttatctttcttgccagtattactgcatattgtcccaatgtttcgatgtgatgttctaacctatcaactgccgctgtatcacaacaatagtgtccgatgaaattaagattatgatccaatgtgtttaatatatgattatcaagtcttatacgatccgcgtcttttttgacaggatcaggttcttctacaggaagaagtttcggcctcttatgatattcatgtctgggaaacggtggtctagggtgaggctccggtatcggagtgggttttggattataatcatcatcgtctatgacatcatcttcgacttcgatatttattttgctatcttgatgatgtcctgtatcagttgcattttcagcactcgactgaatattagcgcattcattgtttattattaccatatttctaaacccaaaatgtatatgttgaacatcagtactatcgttgatgagtcttatagcatgaattcgcttatcgttatcgggtttagcttctgtcaccttagcaattccttttttattaaactctacataatcatatccatttctattgtttgttctaatataaacgagtatagcatcattgctaaatttttcaatagtatcgaaaacagaatatcctaaaccatataatatatattcaggaacactcaaactaaatgtccaggattctcctaaatacgtaaactttaatagtgcgaaatcattcaaaaatctaccacttatagatagatagtacataaatgcgtatagtagtctacctatctctttattatgaaaaccggcattacgatcatatatgtcgtgatatacctgtgatccgtttacgttaaaccataaatacatgggtgatcctataaacatgaatttatttctaattctcagagctatagttaattgaccgtgtaatatttgcttacatgcatacttgatacgctcattaataagatttttatcattgctcgttatctcagaatcgtatatataaggagtaccatcgtgattcttaccagatattatacaaaatactatatataaaatatattgaccaacgttagtaatcatataaatgtttaacgttttaaattttgtattcaatgatccattatcatacgctagcatggtcttatgatattcattctttaaaatataatattgtgttagccattgcattggggctcctaatggagattttttattctcatccattttaggataggctttcataaagtccctaataacttcgtgaataatgtttctatgttttctactgatgcatgtatttgcttcgatttttttatcccatgtttcatctatcatagatttaaacgcagtaatgctcgcaacattaacatcttgaaccgttggtacaattccgttccataaatttataatgttcgccatttatataactcattttttgaatatacttttaattaacaaaagagttaagttactcatatggacgccgtccagtctgaacatcaatctttttagccagagatatcatagccgctcttagagtttcagcgtgattttccaacctaaatagaacttcatcgttgcgtttacaacacttttctatttgttcaaactttgttgttacattagtaatctttttttccaaattagttagccgttgtttgagagtttcctcattgtcgtcttcatcggctttaacaattgcttcgcgtttagcctctggctttttagcagcctttgtagaaaaaaattcagttgctggaattgcaagatcgtcatctccggggaaaagagttccgtccatttaaagtacagattttagaaactgacactctgcgttatttatatttggtacaacacatggattataaatattgatgttaataacatcagaaaatgtaaagtctatacattgttgcatcgtgttaaattttctaatggatctagtattattgggtccaacttctgcctgaaatccaaatatggaagcggatacaaaaccgtttcctggataaaccacacatctccacttttgctttacatcagaaattgtgtcattgacatcttgaactctcctatctaatgccggtgttccacctatagattttgaatattcgaatgctgcatgagtagcattaaattccttaatattgccataattttcatatattgagtaaccctggataaaaagtaaacacaccgcagccgtcgctaccacaataaaaaaaattgatagagagttcatttataatctattagaagctgacaaaatttttttacacgcatcagacaatgctttaataaatagttcaacatctacttttgtcatatcgaaccgatggtatgattctaacctagaattacatccgaaaaagttgactatgttcatagtcattaagtcattaacaaacaacattccagactctggattataagacgatactgtttcgtcacaattacctaccttaatcatgtgattatgaatattggctattagagcaccttctaagaaatctataatatctttgaaacacgatttaaaatcaaaccacgaatatacttctacgaagaaagttagtttacccataggagaaataactataaatggagatctaaatacaaaatccggatctatgatagttttaacattattatattctctattaaatacctccacatctaaaaatgttaattttgaaactatgtcttcgtttattaccgtacctgaactaaacgctataagctctattgtttgagaactctttaaacgatattcttgaaatacatgtaacaaagtttcctttaactcggtcggtttatctaccatagttacagaatttgtatccttatctataatataataatcaaaatcgtataaagttatataattatcgcgttcagattgtgatcttttcaaatagactaaaaaccccatttctctagtaagtatcttatgtatatgtttgtaaaatatcttcatggtgggaatatgctctaccgcagttagccattcctcattgacagcggtagatgtattagacaaaactattccaatgtttaacaagggccattttacgagattattaaatccttgtttgataaatgtagccaatgagggttcgagttcaacgacgattgaattctcttcccgcggatgctgcatgatgaacgacgggatgttgttcgattgatttggaattctttttcgactttttgtttatattaaatattttaaaatttatagctgatagcaattcatgtactacggataatgtagacgcgtattgcgcatcgatatctttattattagataaatttatcaataaatgtgagaagtttgcctcgttaaggtcttccatttaaatattatataaacatttgtgtttgtatcttattcgtcttttatggaatagttttttactagtaaagctgcaattacacactttgtccgtaaaacataaatataaacaccagcttttatcaatcgttccaaaaagtcgacggcggacatttttaacatggcatctattttaaatacacttaggtttttggaaaaaacatcattttataattgtaacgattcaataactaaagaaaagattaagattaaacataagggaatgtcatttgtattttataagccaaagcattctaccgttgttaaatacttgtctggaggaggtatatatcatgatgatttggttgtattggggaaggtaacaattaatgatctaaagatgatgctattttacatggatttatcatatcatggagtgacaagtagtggagcaatttacaaattgggatcgtctatcgatagactttctctaaataggactattgttacaaaagttaataattatgatgatacattttttgacgacgatgattgatcgctattgcacaattttgtttttttactttctaatatagcgtttagattctttttcatgtgcgaatattgatttactaaaatatcgatgtttaacttttgttctatgacgtccttatcagcggtatcggtacatatacgtaattcaccttcacaaaatacggagtcttcgataataatagccaatcgattattggatctagcggtctgtatcatattcaacatgtttaatatatcctttcgtttcccctttacaggcatcgatcgtagcatattttccgcgtctgagatggaaatgttaaaactacaaaaatgcgtaatgttagcccgtcctaatattggtacgtgtctataagtttggcatagtagaataatagacgtgtttaaatgccttccaaagtttaagaattctattagagtattgcattttgatagtttatcgcctacatcatcaaaaataagtaaaaagtgtgctgattttttatgattttgtgcgacagcaatacatttttctatgttacttttagttcgtatcagattatattctagagattcctgactactaacgaaattaatatgatttggccaaatgtatccatcataatctggattataaacgggtgtaaacaagaatatatgtttatattttttaactagtgtagaaaacagagatagtaaatagatagtttttccagatccagatcctcccgttaaaaccattctaaacggcatttttaataaattttctcttgaaaattgtttttcttggaaacaattcataattatatttacagttactaaattaatttgataataaatcaaaatatggaaaactaaggtcgttagtagggaggagaacaaagaaggcatatcgtgatataaataacatttattatcatgatgacaccagaaaacgacgaagagcagacatctgtgttctccgctactgtttacggagacaaaattcagggaaagaataaacgcaaacgcgtgattggtctatgtattagaatatctatggttatttcactactatctatgattaccatgtccgcgtttctcatagtgcgcctaaatcaatgcatgtctgctaacgaggctgctattactgacgccgctgttgccgttgctgctgcatcatctactcatagaaaggttgcgtctagcactacgcaatatgatcacaaagaaagctgtaatggtttatattaccagggttcttgttatatattacattcagactaccagttattctcggatgctaaagcaaattgcactgcggaatcatcaacactacccaataaatccgatgtcttgattacctggctcattgattatgttgaggatacatggggatctgatggtaatccaattacaaaaactacatccgattatcaagattctgatatatcacaagaagttagaaagtatttttgtgttaaaacaatgaactaatatttatttttgtacattaataaatgaaatcgcttaatagacaaactgtaagtaggtttaagaagttgtcggtgccggccgctataatgatgatactctcaaccattattagtggcataggaacatttctgcattacaaagaagaactgatgcctagtgcttgcgccaatggatggatacaatacgataaacattgttatctagataccaacattaaaatgtctacagataatgcggtttatcagtgtcgtaaattacgagctagattgcctagacctgatactagacatctgagagtattgtttagtattttttataaagattattgggtaagtttaaaaaagaccaataataaatggttagatattaataatgataaagatatagatattagtaaattaacaaattttaaacaactaaacagtacgacggatgctgaagcgtgttatatatacaagtctggaaaactggttgaaacagtatgtaaaagtactcaatctgtactatgtgttaaaaaattctacaagtgacaacaaaaactgcagaaaaattgaaaaactagcgtctttttttgctcgactcgagaccatggaggaatccgtggttcggccatctgtatttgtagttgacggccaaacggacattccattcactcgcttgggacgatcacacaggcgacagagttgttcagtcgccagggtgggattgggcttgctgctgctgctcatgggcgccggcttggccgttcaaggttggtttcttcttcagcttcactggcgcttgggggagatggttacgcggttgcccgacgggccagctgggtcttgggaacaactgatccaggagaggagatcacatgaggtcaaccccgcagcgcacttgactggagccaattcttccctcacgggctcaggcggccccctgctctgggagacacagctgggactcgcttttctgcgaggactgtcttatcacgatggagcgctggtggtaaccaagacggggtactactatatctatagtaaggtacagcttggcggggtcggatgcccgctcgggttggcgggaacaatcacccacggtctgtacaagagaacacctcggtacccggaggaacttgaacttctggtgagccagcagagcccgtgtggtagagcaacatccagttccagagtatggtgggattcatcctttctcgggggtgtggtacatctggaggctggcgaaaaagtggtcgtgagagtgcttggaaagaggctcgtacgattgagagatggaactagatcatactttggggcgtttatggtgtgattaattaatttttatgagctcagacggcaatggatggatcataattgatgggaaatgcaatagtaattttttatcataaaagttgtaaagtaaataataaaacaataaatattgaactagtagtacgtatattgagcaatcagaaatgatgctggtacctcttatcacggtgaccgtagttgcgggaacaatattagtatgttatatattatatatttgtaggaaaaagatacgtactgtctataatgacaataaaattatcatgacaaaattaaaaaagataaagagttctaattccagcaaatctagtaaatcaactgatagcgaatcagactgggaggatcactgtagtgctatggaacaaaacaatgacgtagataatatttctaggaatgagatattggacgatgatagcttcgctggtagtttaatatgggataacgaatccaatgttatggcgcctagcacagaacacatttacgatagtgttgctggaagcacgctgctaataaataatgatcgtaatgaacagactatttatcagaacactacagtagtaattaatgaaacggagactgttaaagtacttaatgaagataccaaacagaatcctaactattcatccaatcctttcgtaaattataataaaaccagtatttgtagcaagtcaaatccgtttattacagaacttaacaataaatttagtgagaataatccgtttagacgagcacatagcgatgattatcttaataagcaagaacaagatcatgaacacgatgatatagaatcatcggtcgtatcattggtgtgattagtttcctttttataaaattgaagtaatatttagtattattgctgccgtcacgttgtacaaatggagatattccctgtattcggcatttctaaaattagcaattttattgctaataatgactgtagatattatatagatacagaacatcaaaaaattatatctgatgagatcaatagacagatggatgaaacggtacttcttaccaacatcttaagcgtagaagttgtaaatgacaatgagatgtaccatcttattcctcatagattatcgacgattatactctgtattagttctgtcggaggatgtgttatctctatagataatgacgtcaatggcaaaaatattctaacctttcccattgatcatgctgtaatcatatccccactgagtaaatgtgtcgtagttagcaagggccctacaaccatactggttgctaaagcggatatacccagcaaacgattggtaacatcgtttacaaacgacatactgtatgtaaacaatctatcactgattaattatttgccgttgtctgtattcattattagacgagtcaccgactatttggatagacacatatgcgatcagatatttgctaataataagtggtattcccttataaccatcgacgataagcaatatcctattccatcaaattgtataggtatgtcttctgccaagtacataaattctagcatcgagcaagatactttaatacatgtttgtaacctcgagcatccattcgacttagtatacaaaaaaatgcagtcgtacaattctgtacctatcaaggaacaaatattgtacggtagaattgataatataaatatgagcattagtatttctgtggattaatagatttctagtatggggatcattaatcatctctaatctctaaatacctcataaaacgaaaaaaaagctattatcaaatactgtacggaatagattcattctcttctctttttatgaaactctgttgtatatctactgataaaactggaagcaaaaaatctgataaaaagaataagatcaagatcaaggattatatggaacacgattattataaaataacaatagttcctggttcctcttccacgtctactagctcgtggtattatacacatgcctagtaatagtctctttgcgttgatggaaagcagactagaaataacaggctaaaatgttcagacaccataatagttcccaacccagataataacagagtaccatcaacacattcctttaaactcaatcccaaacccaaaaccgttaaaatgtatccggccaattgatagtagataatgaggtgtacagcgcatgataatttacacagtaaccaaaatgaaaatactttagtaattataagaaatatagatggtaacgtcatcatcaacaatccaataatatgccggagagtaaacattgacggataaaacaaaaatgctccgcataactctatcatggcaataacacaaccaaatacttgtaagattcctaaattagtagaaaatacaacggatatcgatgtataagtgatctcgagaaataataagaataaagtaatgcccgtaaagataaacatcaacattgtttggtaatcattaaaccaattagtatgacgttgaactaatttcacagtaaattttattccagtattatccccgcatgtataagtacctggtaagatatctttatattccataatcaatgagacatcactatctgataacgaatgaagtctagcactagtatgccatttacttaatattgtcgtcttggaagttttattataagttaaaatatcatggttatccaatttccatctaatatactttgtcggattatctatagtacacggaataatgatggtatcattacatgctgtatactctatggtctttgtagttgttataacaaccaacgtatagaggtatatcaacgatattctaactcttgacattttttatttatttaaaatgatacctttgttatttattttattctattttgctaacggtattgaatggcataagtttgaaacgagtgaagaaataatttctacttacttattagacgacgtattatacacgggtgttaatggggcggtatacacattttcaaataataaactaaacaaaactggtttaactaataataattatataacaacatctataaaagtagaggatgcggataaggatacattagtatgcggaaccaataacggaaatcccaaatgttggaaaatagacggttcagacgacccaaaacatagaggtagaggatacgctccttatcaaaatagcaaagtaacgataatcagtcacaacggatgtgtactatctgacataaacatatcaaaagaaggaattaaacgatggagaagatttgacggaccatgtggttatgatttattcacggcggataacgtaattccaaaagatggtttacgaggagcattcgtcgataaagacggtacttatgacaaagtttacattcttttcactgatactatcggctcaaagagaattgttaaaattccgtatatagcacaaatgtgcctaaacgacgaaggtggtccatcatcgttgtctagtcatagatggtcgacgtttctcaaagtcgaattagaatgtgatatcgacggaagaagttatagataaattattcattctaaaactataaaaacagataatgatacgatactatatgtattcttcgatagtccgcattatgtacctattctatgaataccattaaacaatctttttctacgtcaaaattggaaggatatacaaagcaattgccgtctccagctcctggtatatgtctaccagctggaaaagttgttccacataccacgtttgaagtcatagaaaaatataatgtactagatgatattataaagcctttatctaaccaacctatcttcgaaggaccgtctggtgttaaatggttcgatataaaggagaaggaaaatgaacatcgggaatatagaatatacttcataaaagaaaattctatatattcgttcgatacaaaatctaaacaaactcgtagctcgcaagtcgatgcgcgactattttcagtaatggtaacttcgaaaccgttatttatagcagatatagggataggagtaggaatgccacaaatgaaaaaaatacttaaaatgtaatcttaatcgagtacaccacacgacaatgaacaaacataagacagattatgctggttatgcttgctgcgtaatatgcggtctaattgttggaattatttttacagcgacactattaaaagttgtagaacgtaaattagttcatacaccatcaatagataaaacgataaaagatgcatatattagagaagattgtcctactgactggataagctataataataaatgtatccatttatctactgatcgaaaaaacctgggaggaaggacgtaatgcatgcaaagctctaaatccaaattcggatctaattaagatagagactccaaacgagttaagttttttaagaagccttagacgaggctattgggtaggagaatccgaaatattaaaccagacaaccccatataattttatagctaaaaatgccacgaagaatggaactaaaaaacggaaatatatttgtagtacaacgaatactcccaaactgcattcgtgttacactatataacaattacactacatttttatcataacactacttcggttagatgttttagaaaaaaataaatatcgccgtaccgttcttgtttttataaaaataacaattaacaattatcaaattttttctttaatattttacgtggttgaccattcttggtggtaaaataatctcttagtgttggaatggaatgctgtttaatgtttccgcactcatcgtatattttgacgtatgcagtcacatcgtttacgcaatagtcagactgtagttctatcatgcttcctacatcagaaggaggaacagttttaaagtctcttggttttaatctattgccattagttttcatgaaatcctttgttttatccacttcacattttaaataaatgtccactatacattcttctgttaattttactagatcgtcatgggtcatagaatttataggttccgtagtccatggatccaaactagcaaacttcgcgtatacggtatcgcgattagtgtatacaccaactgtatgaaaattaagaaaacagtttaataaatcaacagaaatatttaatcctccgtttgatacagatgcgccatatttatggatttcggattcacacgttgtttgtctgaggtgttcgtctagtgttgcttctacgtaaacttcgattcccatatattctttattgtcagaatcgcataccgatttatcatcatacactgtttgaaaactaaatggtatacacatcaaaataataaataataacgagtacattctgcaatattgttatcgtaattggaaaattagtgttcgagtgagtcggattatgtgagtactggattgtatattttattttatattttgtaataagaataaaatgctaatgtcaagtttattccaatagatgtcttattaaaaaacatatataataaataacaatggctgaatggcataaaattatcgaggatatctcaaaaaataataagttcgaggatgccgccatcgttgattacaagactacaaagaatgttctagctgctattcctaacagaacatttgccaagattaatccgggtgaaattattcctctcatcactaatcgtaatattctaaaacctcttattggtcagaaatattgtattgtatatactaactctctaatggatgagaacacgtatgctatggagttgcttactgggtacgcccctgtatctccgatcgttatagcgagaactcataccgcacttatatttttgatgggtaagccaacaacatccagacgtgatgtgtatagaacgtgtagagatcacgctacccgtgtacgcgcaactggtaattaaaataaaaagtaatattcatatgtagtgtcaattttaaatgatgatgatgaaatggataatatccatattgacgatgtcaataatgccggtattggcatacagctcatcgatttttagatttcattcagaggatgtggaattatgttatgggcatttgtattttgataggatctataatgtagtaaatataaaatataatccgcatattccatatagatataattttattaatcgcacgttaaccgtagatgaactagacgataatgtcttttttacacatggttattttttaaaacacaaatatggttcacttaatcctagtttgattgtctcattatcaggaaacttaaaatataatgatatacaatgctcagtaaatgtatcgtgtctcattaaaaatttggcaacgagtacatctactatattaacatctaaacataagacttattctctacatcggtccacgtgtattactataataggatacgattctattatatggtataaagatataaatgacaagtataatgacatctatgattttactgcaatatgtatgctaatagcgtctacattgatagtgaccatatacgtgtttaaaaaaataaaaatgaactcttaattatgctatgctattagaaatggataaaatcaaaattacggttgattcaaaaattggtaatgttgttaccatatcgtataacttggaaaagataactattgatgttacacctaaaaagaaaaaagaaaaggatgtattattagcgcaatcagttgctgtcgaagaggcaaaagatgtcaaggtagaagaaaaaaatattatcgatattgaagatgacgatgatatggatgtagaaagcgcataatacgatctataaaaataagtatataataaatactttttatttacggtactcttgtagtggtgataccctactcaattatttttttaaaaaaatacttattctgattcttctagccatttccgtgttcgttcgaatgccacatcgacgttaaagataggggagtagttgaaatctagttctgcattgttggtacgcacctcaaatgtagtgttggatatcttcaacgtatagttgttgagtagtgatggttttctaaatagaattctcttcatatcattcttgcacgcgtacatttttagcatccatcttggaattctagatccttgttctattcccaatggtttcatcaatagaagattaaacatatcgtacgaacacgatggagagtaatcgtagcaaaagtaagcatttcctttaatcttagatcccggatactggatatattttgcagccaacacgtgcatccatgcagcatttcctacatatacccggctatgcaccgcgtcatcatcgactgtacgatacataatgttaccgtgttgcttacattgctcgtaaaagactttcgtcaatttgtctccttctccgtaaattccagtgggtcttaggcaacaagtatacaattttgctccattcatgattacggaattattggctttcataaccagttgctcggccatacgtttactttttgcgtatacatgtcctggtgatatatcataaagggtatgctcatggccgatgaatggatcaccgtgtttattgggtcctattgcttccatgctactagtatagatcaaatacttgattcctaggtccacacaagctgccaatatagtctgtgttccataatagtttactttcatgatttcattatcggtgtattttccaaatacatccactagagcagccgtatgaataatcagatttaccccatctagcgcttctctcaccttatcaaagtcgtttatatcacattgtatatagtttataaccttaactttcgaggttattggttgtggatcttctacaatatctatgactctgatttcttgaacatcatctgcactaattaacagttttactatatacctgcctagaaatccggcaccaccagtaaccgcgtacacggccattgctgccactcataatatcagactacttattctattttactaaataatggctgtttgtataatagaccacgataatatcagaggagttatttactttgaaccagtccatggaaaagataaagttttaggatcagttattggattaaaatccggaacgtatagtttgataattcatcgttacggagatattagtcaaggatgtgattccataggcagtccagaaatatttatcggtaacatctttgtaaacagatatggtgtagcatatgtttatttagatacagatgtaaatatatttacaattattggaaaggcgttatctatttcaaaaaatgatcagagattagcgtgtggagttattggtatttcttacataaatgaaaagataatacattttcttacaattaacgagaatggcgtttgatatatcagttaatgcgtctaaaacaataaatgcattagtttacttttctactcagcaaaataaattagtcatacgtaatgaagttaatgatacacactacactgtcgaatttgatagggacaaagtagttgacacgtttatttcatataatagacataatgacaccatagagataagaggggtgcttccagaggaaactaatattggttgcgcggttaatacgccggttagtatgacttacttgtataataagtatagttttaaactgattttagcagaatatataagacacagaaatactatatccggcaatatttattcggcattgatgacactagatgatttggctattaaacagtatggagacattgatctattatttaatgagaaacttaaagtagactccgattcgggactatttgactttgtcaactttgtaaaggatatgatatgttgtgattctagaatagtagtagctctatctagtctagtatctaaacattgggaattgacaaataaaaagtataggtgtatggcattagccgaacatatatctgatagtattccaatatctgagctatctagactacgatacaatctatgtaagtatctacgcggacacactgagagcatagaggatgaatttgattattttgaagacgatgattcgtctacatgttctgccgtaaccgacagggaaacggatgtataattttttttatagcgtgaaggatatgataaaaaatataattgttgtatttatcccattccaatcaccttatatgattctgtaaaaaaattatactgtaacacaataaaggagtcttatagatgtatagaggtcagatactggtttgataaactgtttattccacataagtatgtttgactttatggttagacccgcatactttaacaaatcactgaaaattggagttaggtattgacctctcagaatcagttgccgttctggaacattaaatgtattttttatgatatactccaacgcatttatgtgggcatacaacaagtcattactaatggagtattccaagagttttagttgtctagtatttaacaagagaagagatttcaacagactgtttatgaactcgaacgccgcctcattgtcgcttatattgatgatgtcgaattctcccaatatcatcactgatgagtagctcatcttgttatcgggatccaagttttctaaagatgtcattaaaccctcgatcatgaatggatttatcatcatcgtttttatgttggacatgagcttagtccgtttgtccacatctatagacgacgatttctgaattatttcatatatccctctctttaactccaggaacttgtcaggatggtctactttaatatgttctcgtctaagagatgaaaatctttggatggttgcacgcgacttttctttaaaggatgacgttgcccaagatcctctcttaaatgaatccatcttatccttggacaagatggacagtctattttccttagatggtttaatatttttgttacccatgatctataaaggtagacctaatcgtctcggatgaccatatatttattttcagttttattatacgcataaattgtaaaaaatatgttaggtttacaaaaatgtctcgtggggcattaatcgtttttgaaggattggacaaatctggaaaaacaacacaatgtatgaacatcatggaatctataccggcaaacacgataaaatatcttaactttcctcagagatccactgtcactggaaagatgatagatgactatctaactcgtaaaaaaacctataatgatcatatagttaatctattattttgtgcaaatagatgggagtttgcatcttttatacaagaacaactagaacagggaattactttaatagttgatagatacgcattttctggagtagcgtatgccgccgctaaaggcgcgtcaatgactctcagtaagagttatgaatctggattgcctaaacccgacttagttatattcttggaatctggtagcaaagaaattaatagaaacgtcggcgaggaaatttatgaagatgttacattccaacaaaaggtattacaagaatataaaaaaatgattgaagaaggagatattcattggcaaattatttcttctgaattcgaggaagatgtaaagaaggagttgattaagaatatagttatagaggctatacacacggttactggaccagtggggcaactgtggatgtaatagtgaaattacattttttataaatagatgttagtacagtgttataaatggatgaagcatattactctggcaacttggaatcagtactcggatacgtgtccgatatgcataccgaactcgcatcaatatctcaattagttattgccaagatagaaactatagataatgatatattaaacaaggacattgtaaattttatcatgtgtagatcaaacttggataatccatttatctctttcctagatactgtatatactattatagatcaagagatctatcagaccgaattgattaattcattagacgacaatgaaattatcgattgtatagttaacaagtttatgagcttttataaggataacctagaaaatatagtagatgctatcattactctaaaatatataatgaataatccagattttaaaactacgtatgccgaagtactcggttccagaatagccgatatagatattaaacaagtgatacgtaagaatatactacaattgtctaatgatatccgcgaacgatatttgtgaaaaatattaaaaaaaaatactttttttattaaatgacgtcgcttcgcgaatttagaaaattatgctgtgatatatatcacgcatcaggatataaagaaaaatctaaattaattagagactttataacagatagggatgataaatatttgatcattaagctattgcttcccggattagacgatagaatttataacatgaacgataaacaaattataaaattatatagtataatatttaaacaatctcaggaagatatgctacaagatttaggatacggatatataggagacactattaggactttcttcaaagagaacacagaaatccgtccacgagataaaagcattttaactttagaagaagtggatagttttttaactacgttatcatccgtaactaaagaatcgcatcaaataaaattattgactgatgtagcatctgtttgtacatgtaatgatttaaaatgtgtagtcatgcttattgataaagatctaaaaattaaagcgggccctcggtacgtacttaacgctattagtcctcatgcctatgatgtgtttagaaaatctaataacttgaaagagataatagaaaatgcatctaaacaaaatctagactctatatctatttctgttatgactccaattaatcccatgttagcggaatcgtgtgattctgtcaataaggcgtttaaaaaatttccatcaggaatgtttgcggaagtcaaatacgatggtgaaagagtacaagttcataaaaataataacgagtttgccttctttagtagaaacatgaaaccagtactctctcataaagtggattatctcaaagaatacataccgaaagcatttaaaaaagctacgtctatcgtattggattctgaaattgttcttgtagacgaacataatgtaccgctaccgtttggaagtttaggaatacacaaaaagaaagaatataaaaactctaacatgtgtttgttcgtgtttgactgtttgtactttgatggattcgatatgacggacattccattgtacgaacgaagatcttttctcaaagatgttatggttgaaatacccaatagaatagtattctcagagttgacgaatattagtaacgagtctcagttaactgacgtattggatgatgcactaacgagaaaattagaaggattggtcttaaaagatattaatggagtatacgaaccgggaaagagaagatggttaaaaataaagcgagactatttgaacgagggttccatggcagattctgccgatttagtagtactaggtgcctactatggtaaaggagcaaagggtggtatcatggcagtctttctaatgggttgttacgacgatgaatccggtaaatggaagacggttaccaagtgttcaggacacgatgataatacgttaagggagttgcaagaccaattaaagatgattaaaattaacaaggatcccaaaaaaattccagagtggttagtagttaataaaatctatattcccgattttgtagtagaggatccgaaacaatctcagatatgggaaatttcaggagcagagtttacatcttccaagtcccataccgcaaatggaatatccattagatttcctagatttactaggataagagaggataaaacgtggaaagaatctactcatctaaacgatttagtaaacttgactaaatcttaatagttacatacaaactgaaaattaaaataacaccatttagttggtggtcgccatggatggtgttattgtatactgtctaaacgcgttagtaaaacatggcgaggaaataaatcatataaaaaatgatttcatgattaaaccatgttgtgaaagagtttgtgaaaaagtcaagaacgttcacattggcggacaatctaaaaacaatacagtgattgcagatttgccatatatggataatgcggtatccgatgtatgcaattcactgtataaaaagaatgtatcaagaatatccagatttgctaatttgataaagatagatgacgatgacaagactcctactggtgtatataattattttaaacctaaagatgttattcctgttatcatatctataggaaaggataaagatgtctgtgaactattaatctcatcagacatatcgtgtgcatgcgtggagttaaattcatatcacgtagccattcttcccatgaatgtttccttttttaccaaaggaaatgcctcgttgattattctcctgtttgatttctctatcgatgcagcacctctcttaagaagtgtaaccgataataatgttattatatctagacaccagcgtctacatgacgagcttccgagttccaattggttcaagttttacataagtataaagtccgactattgttctatattatatatggttgttgatggatctgtgatgcatgcgatagctgataatagaactcacgcaattattagcaaaaatatattagacaatactacaattaacgatgagtgtagatgctgttattttgaaccacagattaggattcttgatagagatgagatgctcaatggatcatcgtgtgatatgaacagacattgtattatgatgaatttacctgatgtaggcgaatttggatctagtatgttggggaaatatgaacctgacatgattaagattgctctttcggtggctggtaatttaataagaaatcgagactacattcccgggagacgaggctatagctactacgtttacggtatagcctctagataatttttttaagcacgaaataaaaaacataattttaaaccaatctatttcatactattttgtgtgatcaccatggacataaagatagatattagtatttctggtgataaatttacggtgactactaggagggaaaatgaagaaagaaaaaaatatctacctctccaaaaagaaaaaactactgatgttatcaaacctgattatcttgagtacgatgacttgttagatagagatgagatgtttactattctagaggaatattttatgtacagaggtctattaggcctcagaataaaatatggacgactctttaacgaaattaaaaaattcgacaatgatgcggaagaacaattcggtactatagaagaactcaagcagaaacttagattaaattctgaagagggagcagataactttatagattatataaaggtacaaaaacaggatatcgtcaaacttactgtatacgattgcatatctatgataggattgtgtgcatgcgtggtagatgtttggagaaatgagaaactgttttctagatggaaatattgtttacgagcgattaaactgtttattaatgatcacatgcttgataagataaaatctatactgcagaatagactagtatatgtggaaatgtcatagaaagttaatgagagcaaaaatatataaggttgtattccatatttgttattttttctgtaatagttaaaaaaatacattcgatggtctatctatcagattattatgtgttataaggtactttttctcataataaactagagtatgagtaagatagtgtttttcaaaacatataaatctaaaattgatggatgagatatacagctattaatttcgaaaatatataaatctaaaattgatggataagatatacagctattaatttcgaaaatatattttaatctgataactttaaacatggatttttgatggtggtttaacgttttaaaaaaagattttgttattgtagtatatgataatattaaaagatggatataaagaatttgctgactgcatgtactattttttacattactacattggctacggcagatatacctactccgccaccaacgggtcatgtgacaagggagaatatcttgataagaggcataatcaatgttgtaatcggtgtccacctggagaatttgccaaggttagatgtaatggtaacgataacacaaaatgtgaacgctgcccacctcatacatataccacaatccccaattattctaatggatgtcatcaatgtagaaaatgcccaaccggatcatttgataaggtaaagtgtaccggaacacagaacagtaaatgttcgtgtcttcctggttggtattgcgctactgattcttcacagactgaagattgttgaaattgtgtaccaaaaaggagatgtccatgcggatactttggtggaatagatgaacaaggaaatcctatttgtaaatcgtgctgtattggtgaatattgcaactacctacgtaattatagacttgatccattttctccatgcaaactatctaaatgtaattaattatgattttgatgataatgttaccatacattatatcgctacttggttagtgtattattcagtatgaagacctattaataattacttatcttttgacgatcttgttataattataatataaaaacttatggcatagtaactcataattgctgacgcgataaattcgtaataatctgttttgttcaaatttttataaggaatctacaggcataaaaataaaaatataatttataatatactcttacagcgcgccatcatgaatagcagcagtaaattaattgctgttattaatggatttagaaatagtggacgattttgtgatattaatatagttattaatgatgaaaggataaacgctcacagactcatcctatctggagcctccgaatatttttccattctgttttccaataattttatcgattctaatgaatacgaagttaatctaagtcatttagattatcaaagtgttaacgatttgatcgattacatttatgggatacctttgagcctaactaacgataacgtgaaatatattctttcaaccgctgattttttacaaattggatctgccattactgagtgcgaaaaatacatacttaaaaatctttgttctagaaactgtatcgatttctacatatacgctgataaatataataacaagaaaatagaatcagcgtcgtttaacacaatattacgaaatattttgagactcatcaacgatgaaaactttaaatacttaacagaggaatcaatgataaaaattttaagcgatgatatgttaaatataaaaaatgaggattttgcaccactaattctcattaaatggttagagagtactcaacaatcatgcaccgtcgagttacttagatgcctcagaatatcattgctttccccacaagttataaaatcactttatagtcatcaactggttagttcaatctacgaatgtataacattcttaaacaatatagcattcttggatgaatcatttcctagataccatagcatcgagttgatatctatcggtataagtaattcgcatgataagatttccataaactgctacaatcataaaaaaaatacatgggaaatgatatcttcacgtagatataggtgtagtttcgcagtggccgtcctggataatattatctatatgatgggtggatatgatcagtccccgtatagaagttcaaaggttatagcgtacaatacatgtacaaattcttggatatatgatataccagagctaaaatatcctcgttctaattgtgggggactggctgatgacgaatacatttattgtataggcggcatacgcgatcaggattcatcgttgacatctagtattgatagatggaagccatcaaaaccatattggcagaagtatgctaaaatgcgcgaaccaaaatgtgatatgggggttgcgatgttaaacggattaatatatgtcatgggtggaatcgttaaaggtgacacgtgtaccgacgcactagagagtttatcagaagatggatggatgaagcatcaacgtcttccaataaaaatgtccaatatgtcgacgattgttcatgatggcaagatttatatatctggaggttacaacaatagtagtgtagttaatgtaatatcgaatctagtccttagctataatccgatatatgatgaatggaccaaattatcatcattaaacattcctagaattaatcccgctctatggtcagcgcataataaattatatgtaggaggaggaatatctgatgatgttcgaactaatacatctgaaacatacgataaagaaaaagattgttggacattggataatggtcacgtgttaccacgcaattatataatgtataaatgcgaaccgattaaacataaatatccattggaaaaaacacagtacacgaatgattttctaaagtatttggaaagttttataggtagttgatagaacaaaatacataattttgtaaaaataaatcactttttatactaatatgacacgattaccaatacttttgttactaatatcattagtatacgctacaccttttcctcagacatctaaaaaaataggtgatgatgcaactctatcatgtaatcgaaataatacaaatgactacgttgttatgagtgcttggtataaggtacctagtagaatttcattttgtttttttctatgctataaatactgcagaccatgtaccgaatgcagctcctctcttgcatagctctctctttggcacttgtgactaacagtgcaccgacgtcttccagtactaagaagacgcaattgcaactggagcacttgctgttggatcttcaaatgattctgaacggaattaacaactacaagaacccaaagcttacccggatgctcactgctaagttctatatgcctaaaaaagccaccgagctgaaacatcttcaatgcctcgaagaagctcttaaacctcttgaggaggttctgaacctggctcagagcaaaaactttcatttcgacccgcgagatgtggtcagcaacataaacgtgtttgtgcttgaactcaaggggagtgaaactacctttatgtgcgagtatgcagatgagactgccacaatcgttgaattccttaatcgatggatcacattctgcacgagcattatttcaaccttgactggtgggggtggttctggtggcggtggatcaggagggggtggaagcaggggcgtattccgaagagacgctcataaaagcgaggtggcccaccgattcaaggacttgggagaagaaaatttcaaggccctcgtcctgattgcctttgcccagtaccttcaacaatgtccattcgaggaccacgttaagcttgtgaatgaagttactgaatttgcaaagacgtgcgtcgcggacgagtctgccgaaaactgcgataaaagcttgcacactctgttcggggataagctctgcacagtggcaacccttcgcgaaacatatggcgaaatggctgattgttgcgcaaaacaagagcccgagaggaatgagtgctttttgcaacacaaagatgataacccaaatctccctaggctggttcgccccgaagtggacgtaatgtgtacggcgtttcatgacaacgaggaaacctttctcaaaaagtatttgtacgagattgctagacgccatccttatttctatgctcccgagttgctgttttttgccaaaagatataaagcagcattcaccgagtgttgtcaggctgccgacaaggcagcatgtcttcttccgaaactggacgagctgagggacgaggggaaagccagtagtgcaaagcaacgattgaaatgtgcatcattgcagaagttcggtgaaagagcatttaaagcttgggcagtagctcggttgagccaacgatttcccaaggctgagtttgccgaagttagtaagctcgtcacggacctcacgaaagtccacacagagtgttgccatggcgacctcctcgagtgcgcagatgatcgagctgatcttgccaagtatatctgtgaaaatcaagattcaattagctctaaattgaaggaatgttgcgaaaaacccttgttggaaaagtcacattgtattgcggaggtcgaaaatgacgaaatgcccgccgatttgccttccctggctgcggattttgtcgagagcaaggatgtgtgtaagaactatgcagaggcaaaggatgtattcttggggatgttcctttacgaatacgccagacgccaccctgactacagcgtagtgctccttttgcgcttggccaaaacatatgaaacgaccctcgaaaaatgttgtgctgcggcagatccgcacgagtgttacgccaaggtattcgacgaatttaagccacttgttgaagagccgcagaatcttatcaagcagaattgcgaactttttgagcagctcggagagtataagttccagaatgcgttgctcgtgcgatacaccaaaaaagtgccgcaggtatccacccccaccctggtcgaagtatccagaaatctcgggaaagttggctccaagtgttgtaaacacccggaggcgaagagaatgccttgcgcagaagattacctttccgtcgtcctgaatcaactgtgcgtcctccatgagaaaacaccagtctcagatcgcgtgacgaagtgttgcacggagagcttggtcaacagacggccctgtttctcagcgctggaggtagatgaaacatatgtgccgaaggagtttaatgcggaaaccttcaccttccatgccgacatctgtactctgagcgagaaggagagacagataaagaaacaaacggctcttgttgaactggtgaaacacaaaccaaaggctacaaaagaacagcttaaagcagtgatggacgatttcgcagcatttgtcgaaaaatgctgcaaggctgatgacaaagagacgtgcttcgctgaagagggtaaaaagctcgtcgcggcgtctcaagcagcactcggcctctgattaattaatttttatgagctcatgcggatctttatgatacgtacaatgataatgatacagtaccaccaactactgtaggcggtagtacaacctctattagcaattataaaaccaaggactttgtagaaatatttggtattaccgcattaattatattgtcggccgtggcaatattctgtattacatattatatatataataaacgttcacgtaaatacaaaacagagaacaaagtctagatttttgacttacataaatgtctgggatagtaaaatctatcatattgagcggaccatctggttcaggaaagacagccatagccaaaagactatgggaatatatttggatttgtggtgtcccataccactagatttcctcgtcctatggaacgagaaggtgtcgattaccattacgttaacagagaggccatctggaagggaatagccgccggaaactttctagaacatactgagtttttaggaaatatttacggaacttctaaaactgctgtgaatacagcggctattaataatcgtatttgtgtgatggatctaaacatcgatggcgttagaagtcttaaaaatacgtacctaatgccttactcggtgtatataagacctacctctcttaaaatggttgagaccaagcttcgttgtagaaacactgaagcggatgatgagattcatcgtcgtgtgatgttggcaaaaactgacatggatgaggcaggtgaagccggtctattcgacactattatcattgaagatgatgtgaatttagcatatagtaagttaattcagatactacaggaccgtattagaatgtattttaacactaattagagacttaagacttaaaacttgataattaataatataactcgtttttatatgtggctatttcaacgtctaatgtattagttaaatattaaaacttaccacgtaaaacttaaaatttaaaatgatatttcattgacagatagatcacacattatgaactttcaaggacttgtgttaactgacaattgcaaaaatcaatgggtcgttggaccattaataggaaaaggtggattcggtagtatttatactactaatgacaataattatgtagtaaaaatagagcccaaagctaacggatcattatttaccgaacaggcattttatactagagtacttaaaccatccgttatcgaagaatggaaaaaatctcacaatataaagcacgtaggtcttatcacgtgcaaggcatttggtctatacaaatccattaatgtggaatatcgattcttggtaattaatagattaggtgcagatctagatgcggtgatcagagccaataataatagattaccaaaaaggtcggtgatgttgatcggaatcgaaatcttaaataccatacaatttatgcacgagcaaggatattctcacggagatattaaagcgagtaatatagtcttggatcaaatagataagaataaattatatctagtggattacggattggtttctaaattcatgtctaatggcgaacatgttccatttataagaaatccaaataaaatggataacggtactctagaatttacacctatagattcgcataaaggatacgttgtatctagacgtggagatctagaaacacttggatattgtatgattagatggttgggaggtatcttgccatggactaagatatctgaaacaaagaattgtgcattagtaagtgccacaaaacagaaatatgttaacaatactgcgactttgttaatgaccagtttgcaatatgcacctagagaattgctgcaatatattaccatggtaaactctttgacatattttgaggaacccaattacgacgagtttcggcacatattaatgcagggtgtatattattaagtgtggtgtttggtcgatgtaaaatttttgtcgataaaaattaaaaaataacttaatttattattgatctcgtgtgtacaaccgaaatcatggcgatgttttacgcacacgctctcggtgggtacgacgagaatcttcatgcctttcctggtaccaaaaattgaaaaactagcgtctttttttgctcgactgcagaccatggagacacccaagcctaggatactgccctggctcgtgagccagctcgatctcggccaactcgaaggtgtcgcttggttggacgagtcaaggacaagattcagaataccctggaagcatggcctgagacaggatgctcagatggccgattttggtatttttcaagcttgggccgaagcttctggtgcttacacccccggcaaggataaacctgatgtgtccacttggaaacggaatttccggtctgccttgaaccggaaggaagtgttgcgcctcgccgcagataactctaaagatccttacgaccctcacaaagtttatgagtttgttactcccggggcaagagattttgtgcatcttggggcttcacccgatactaatggaaaaagtagtcttccccacagtcaggagaatcttcccaaactttttgatgggcttattctcgggcccttgaaggatgaggggagttccgatttggcaatagtctctgacccaagccagcaactgccatcaccaaacgtcaacaattttctcaatccagccccccaagagaacccccttaaacagcttcttgccgaggagcaatgggagttcgaagttactgccttctatcgcgggaggcaggtattccaacaaaccttgttttgtccaggaggcttgagactcgtgggcagcactgctgatatgactctgccctggcagccagtgaccctccccgaccctgaagggttcctgactgacaaactcgtgaaggagtacgtgggacaagtactgaagggcctgggaaatggtcttgccctctggcaagctggacagtgcttgtgggctcaacgccttggacattcacacgcattttgggccctcggggaggagcttcttcctgacagtggccgcggaccagatggcgaggtacataaggataaagatggtgcagtcttcgacctcagaccatttgtcgcagaccttatcgccttcatggaaggttccggtcacagccctagatatacactttggttctgtatgggggaaatgtggccacaagatcaaccttgggtcaagcgccttgttatggtaaaggtggtccctacatgtttgaaagagctgctcgaaatggctcgggaaggaggagcctcttctttgaaaactgtagacctgcacatatctaacagccaaccaatcagcctgacctccgatcagtacaaagcttaccttcaagaccttgtcgaggacatggacttccaagccacaggcaacatttgattaattaatttttatgagctcctggtaaaagttaaacttggggagaatgatacagaaaatctttcttctactatatcggcggcaccatcgaggtaaccacctctcaagaagaccgcgtgaataatgtactcatgaaacgtttggaaactatacgccatatgtggtctgttgtatatgatcattttgatattgtgaatggtaaagaatgctgttatgtgcatacgcattcatctaatcaaaatcctataccgagtactgtaaaaacaaatttgtacatgaagactatgggatcatgcattcaaatggattccatggaagctctagagtatcttagcgaactgaaggaatcaggtggatggagtcccagaccagaaatgcaggaatttgaatatccagatggagtggaagacactgaatcaattgagagattggtagaggagttcttcaatagatcagaacttcaggctggtaaattagtcaaatttggtaattctattaattgttaaacatacatctgtttcagctaagcaactaagaacacgtatacggcagcagcttccttttatactctcatcttttaccaacacaaagggtggatatttgttcattggagttgataataatacacacaaagtatttggattcacggtgggttacgactacctcagactgatagagaatgatatagaaaagcatatcaaaagactttgtgttgtgcatttctgtgagaagaaagaggacatcaagtacacgtgtcgattcatcaaggtatataaacctggggatgaggctacctcgacatacgtgtgcgctatcaaagtggaaagatgctgttgtgctgtgtttgcagattggccagaatcatggtatatggatactaatggtatcaagaagtattctccagatgaatgggtgtcacatataaaattttaattaatgtaactatagagaacaaataataggttgtaatatcatatagacaataactaacaattaattagtaactgttatctcttttttaactaaccaactaactatatacctattaatacatcgtaattatagttcttaacatctattaatcattgattcgcttctttaattttttataaactaacattgttaattgaaaagggataacatgttacagaatataaattatatatggatttttttaaaaaggaaatacttgactggagtgtatatttatctcttcattatatagcacgcgtgtgttccaattcttccacatcccatataatacaggattataatctcgttcgaacatacgagaaagtggataaaacaatagttgattttttatctaggttgccaaatttattccatattttagaatatggggaaaatattctacatatttattctatggatgatgctaatacgaatattataattttttttctagatagagtattaaatattaataagaacgggtcatttatacacaatctcaggttatcatcatccattaatataaaagaatatgtatatcaattagttaataatgatcatccagataataggataagactaatgcttgaaaatggacgtagaacaagacattttttgtcctatatatcagatacagttaatatctatatatgtattttaataaatcatggattttatatagatgcagaagacagttacggttgtacattattacatagatgtatatatcactataagaaatcagaatcagaatcatacaatgaattaattaagatattgttaaataatggatccgatgtagataaaaaagatacgtacggaaacacaccttttatcctattatgtaaacacgatatcaacaacgtggaattgtttgagatatgtttagagaatgctaatatagactctgtagactttaatagatatacacctcttcattatgtctcatgtcgtaataaatatgattttgtaaagttattaatttctaaaggagcaaatgttaatgcgcgtaataaattcggaactactccattttattgtggaattatacacggtatctcgcttataaaactatatttggaatcagacacagagttagaaatagataatgaacatatagttcgtcatttaataatttttgatgctgttgaatctttagattatctattatccagaggagttattgatattaactatcgtactatatacaacgaaacatctatttacgacgctgtcagttataatgcgtataatacgttggtctatctattaaacagaaatggtgattttgagacgattactactagtggatgtacatgtatttcggaagcagtcgcaaacaacaacaaaataataatggaagtactattgtctaaacgaccatctttgaaaattatgatacagtctatgatagcaattactaaaaataaacaacataatgcagatttattgaaaatgtgtataaaatatactgcgtgtatgaccgattatgatactcttatagatgtacagtcgctacagcaatataaatggtatattttaaaatgtttcgatgaaatagatatcatgaagagatgttatataaaaaataaaactgtattccaattagttttttgtatcaaagacattaatactttaatgagatatggtaaacatccttctttcgtgaagtgcactagtctcgacgtatacggaagtcgtgtacgtaatatcatagcatctattagatatcgtcagagattaattagtctattatccaagaagctggatgcgggagataaatggtcgtgttttcctaacgaaataaaatataaaatattggaaaactttaacgataacgaactatccacatatctaaaaatcttataaacactattaaaatataaaatctaagtaggataaaatcacactacatcattgtttccttttagtgctcgacagtgtatactatttttaacactcataaataaaaatgaaaacgatttccgttgttacgttgttatgcgtactacctgctgttgtttattcaacatgtactgtacccactatgaataacgctaaattaacgtctaccgaaacatcgtttaatgataaacagaaagttacatttacatgtgatcagggatatcattctttggatccaaatgctgtctgcgaaacagataaatggaaatacgaaaatccatgcaagaaaatgtgcacagtttctgattatgtctctgaattatatgataagccattatacgaagtgaattccaccatgacactaagttgcaacggcgaaacaaaatattttcgttgcgaagaaaaaaatggaaatacttcttggaatgatactgttacgtgtcctaatgcggaatgtcaacctcttcaattagaacacggatcgtgtcaaccagttaaagaaaaatactcatttggggaatatatgactatcaactgtgatgttggatatgaggttattggtgcttcgtacataagttgtacagctaattcttggaatgttattccatcatgtcaacaaaaatgtgatataccgtctctatctaatggattaatttccggatctacattttctatcggtggcgttatacatcttagttgtaaaagtggttttatactaacgggatctccatcatccacatgtatcgacggtaaatggaatcccatactcccaacatgtgtacgatctaacgaaaaatttgatccagtggatgatggtcccgacgatgagacagatttgagcaaactctcgaaagacgttgtacaatatgaacaagaaatagaatcgttagaagcaacttatcatataatcatagtggcgttaacaattatgggcgtcatatttttaatctccgttatagtattagtttgttcctgtgacaaaaataatgaccaatataagttccataaattgctaccgtaaatataaatccgttaaaataattaataatttaataacaaacaagtatcaaaagattaaagacttatagctagaatcaattgagatgtcttcttcagtggatgttgatatctacgatgccgttagagcatttttactcaggcactattataacaagagatttattgtgtatggaagaagtaacgccatattacataatatatacaggctatttacaagatgcgccgttataccgttcgatgatatagtacgtactatgccaaatgaatcacgtgttaaacaatgggtgatggatacacttaatggtataatgatgaatgaacgcgatgtttctgtaagcgttggcaccggaatactattcatggaaatgtttttcgattacaataaaaatagtatcaacaatcaactaatgtatgatataattaatagcgtatctataattctagctaatgagagatatagaagcgcttttaacgacgatggtatatacatccgtagaaatatgattaacaagttgtacggatacgcatctctaactactattggcacgatcgctggaggtgtttgttattatctgttgatgcatctagttagtttgtataaataattatttcaatatactagttaaaattttaagattttaaatgtataaaaaactaataacgtttttatttgtaataggtgcattagcatcctattcgaataatgagtacactccgtttaataaactgagtgtaaaactctatatagatggagtagataatatagaaaattcatatactgatgataataatgaattggtgttaaattttaaagagtacacaatttctattattacagagtcatgcgacgtcggatttgattccatagatatagatgttataaacgactataaaattattgatatgtataccattgactcgtctactattcaacgcagaggtcacacgtgtagaatatctaccaaattatcatgccattatgataagtacccttatattcacaaatatgatggtgatgagcaacaatattctattactgcagagggaaaatgctataaaggaataaaatatgaaataagtatgatcaacgatgatactctattgagaaaacatactcttaaaattggatctacttatatatttgatcgtcatggacatagtaatacatattattcaaaatatgatttttaaaaatttaaaatatattatcacttcagtgacagtagtcaaataacaaacaacaccatgagatatattataattctcgcagttttgttcattaatagtatacacgctaaaataactagttataagtttgaatccgtcaattttgattccaaaattgaatggactggggatggtctatacaatatatcccttaaaaattatggcatcaagacgtggcaaacaatgtatacaaatgtaccagaaggaacatacgacatatccgcatttccaaagaatgatttcgtatctttctgggttaaatttgaacaaggcgattataaagtggaagagtattgtacgggactatgcgtcgaagtaaaaattggaccaccgactgtaacattgactgaatacgacgaccatatcaatttgtacatcgagcatccgtatgctactagaggtagcaaaaagattcctatttacaaacgcggtgacatgtgtgatatctacttgttgtatacggctaacttcacattcggagattctaaagaaccagtaccatatgatatcgatgactacgattgcacgtctacaggttgcagcatagactttgtcacaacagaaaaagtgtgcgtgacagcacagggagccacagaagggtttctcgaaaaaattactccatggagttcgaaagtatgtctgacacctaaaaagagtgtatatacatgcgcaattagatccaaagaagatgttcccaatttcaaggacaaaatggccagagttatcaagagaaaatttaataaacagtctcaatcttatttaactaaatttctcggtagcacatcaaatgatgttaccacttttcttagcatgcttaacttgactaaatattcataactaatttttattaatgatacaaaaacgaaataaaactgcatattatacactggttaacgcccttataggctctaaccattttcaagatgaggtccctgattatagtccttctgttcccctctatcatctactccatgtctattagacgatgtgagaagactgaagaggaaacatggggattgaaaatagggttgtgtataattgccaaagatttctatcccgaaagaactgattgcagtgttcatctcccaactgcaagtgaaggattgataactgaaggcaatggattcagggatatacgaaacaccgataaattataaaaaaagcaatgtgtccgctgtttccgttaataatactattttcgtaactggcggattattcataaataactctaatagcacgatcgtggttaacaatatggaaaaacttgacatttataaagacaaacaatggtcgattatagaaatgcctatggctagggtatatcacggcatcgactcgacatttggaatgttatattttgccggaggtctatccgttaccgaacaatatggtaatttagagaaaaacaacgagatatcttgttacaatcctagaacgaataagtggtttgatatttcatatactatttataagatatccatatcatcattgtgtaaactaaataacgtcttctatgtatttagtaaggacattggatatgtggaaaagtatgatggtgcatggaagttagtacatgatcgtctccccgctataaaggcattatcaacttctccttattgattgaaaatgaaaatataaatagtttttatgtatagcagtattaccctatagttttattgcttactactaacatggatacagatgttacaaatgtagaagatatcataaatgaaatagatagagagaaagaagaaatactaaaaaatgtagaaattgaaaataataaaaacattaacaagaatcatccaagtggatatattagagaagcactcgttattaatacaagtagtaatagtgattccattgataaagaagttatagaatgtatcagtcacgatgtaggaatatagatcatatctactaatttttataatcgatacaaaacataaaaaacaactcgttattacatagcaggcatggaatccttcaagtattgttttgataacgatggcaagaaatggattatcggaaatactttatattctggtaattcaatactatataaggtcagaaaaaatttcactagttcgttctacaattacgtaatgaaaatagatcacaaatcacacaagccattgttgtctgaaatacgattctatatatctgtattggatcctttgactatcgacaactggacacgggaacgtggtataaagtatttggctattccagatctgtatggaattggagaaaccgatgattatatgttcttcgttataaagaattcgggaagagtattcgccccaaaggatactgaatcagtcttcgaagcatgcgtcactatgataaacacgttagagtttatacactctcgaggatttacccatggaaaaatagaaccgaggaatatactgattagaaataaacgtctttcactaattgactattctagaactaacaaactatacaagagtggaaactcacatatagattacaacgaggacatgataacttcaggaaatatcaattatatgtgtgtagacaatcatcttggagcaacagtttcaaaacgaggagatttagaaatgttgggatattgcatgatagaatggttcggtggcaaacttccatggaaaaacgaaagtagtataaaagtaataaaacaaaaaaaagaatataaaaaatttatagctactttctttgaggactgttttcctgaaggaaatgaacctctggaattagttagatatatagaattagtatacacgttagattattctcaaactcctaattatgacagactacgtaaactgtttatacaagattgaaattatattctttttttatagagtgtggtagtgttacggatatctaatattaatattagactatctctatcgcgctacacgaccaatatcgattactatggatatcttcagggaaatcgcatcttctatgaaaggagagaatgtattcatttctccagcgtcaatctcgtcagtattgacaatactgtattatggagctaatggatccactgctgaacagctatcaaaatatgtagaaacggaggagaacacggataaggttagcgctcagaatatctcattcaaatccatgaataaagtatatgggcgatattctgccgtgtttaaagattcctttttgagaaaaattggcgataagtttcaaactgttgacttcactgattgtcgcactatagatgcaatcaacaagtgtgtagatatctttactgaggggaaaatcaatccactattggatgaaccattgtctcctgatacctgtctcctagcaattagtgccgtatactttaaagcaaaatggttgatgccattcgaaaaggaatttaccagtgattatcccttttacgtatctccgacggaaatggtagatgtaagtatgatgtctatgtacggcaaggcatttaatcacgcatctgtaaaggaatcattcggcaacttttcaatcatagaactgccatatgttggagatactagtatgatggtcattcttccagacaagattgatggattagaatccatagaacaaaatctaacagatacaaattttaagaaatggtgtaactctctggaagctacgtttatcgatgttcacattcccaagtttaaggtaacaggttcgtataatcttgtggatactctagtaaagtcaggactgacagaggtgttcggttcaactggagattatagcaatatgtgtaattcagatgtgagtgtcgacgctatgattcacaaaacgtatatagatgtcaatgaagagtatacagaagcagctgcagcaacttgtgcactggtgtcagactgtgcatcaacaattacaaatgagttctgtgtagatcatccgttcatctatgtgattaggcatgttgatggaaaaattcttttcgttggtagatattgctctccgacaactaattgttaaccattttttttaaaaaaatagaaaaaacatgtggtattagtgcaggtcgttgttcttccaattgcaattggtaagatgacggccaactttagtacccacgtcttttcaccacagcactgtggatgtgacagactgaccagtattgatgacgtcagacaatgtttgactgaatatatttattggtcgtcctatgcataccgcaacaggcaatgcgctggacagttgtattccacactcctctcttttagagatgatgcggaatcagtgttcatcgacattcgcgagctggtaaaaaatatgccgtgggatgatgtcaaagattgtacagaaatcatccgttgttatataccggatgagcaaaaaaccatcagagagatttcggccatcatcggactttgtgcatatgctgctacttactggggaggtgaagaccatcccactagtaacagtctgaacgcattgtttgtgatgcttgagatgctcaattacgtggattataacatcatattccggcgtatgaattgatgagttgtacatcttgacattttctttcttctcttctccctttcttctcttctcccttcctccctcttctccctttcccagaaacaaacttttttacccactataaaataaaatgagtatactacctattatatttcttcctatatttttttattcttcattcgttcagacttttaacgcgcctgaatgtatcgacaaagggcaatattttgcatcattcatggagttagaaaacgagccagtaatcttaccatgtcctcaaataaatacgctatcatccggatataatatattagatattttatgggaaaaacgaggagcggataatgatagaattataccgatagataatggtagcaatatgctaattctgaacccgacacaatcagactctggtatttatatatgcattaccacgaacgaaacctactgtgacatgatgtcgttaaatttgacaatcgtgtctgtctcagaatcaaatatagatcttatctcgtatccacaaatagtaaatgagagatctactggcgaaatggtatgtcccaatattaatgcatttattgctagtaacgtaaacgcagatattatatggagcggacatcgacgccttagaaataagagacttaaacaacggacacctggaattattaccatagaagatgttagaaaaaatgatgctggttattatacatgtgttttagaatatatatacagaggtaaaacatataacgtaaccagaattgtaaaattagaggtacgggataaaataataccttctactatgcaattaccagatggcattgtaacttcaataggtagtaatttgactattgcgtgtagagtatcgttgagacctcccacaacggatgcagacgtcttttggataagtaatggtatgtattacgaagaagatgatggggacggagacggtagaataagtgtagcaaataaaatctatatgaccgataagagacgtgttattacatcccggttaaacattaatcctgtcaaggaagaagatgctacaacgtttacgtgtatggcgtttactattcctagcatcagcaaaacagttactgttagtataacgtgaatgtatgttgttacatttccatgtcaattgagtttataagaatttttatacattatcttccaacaaacaattgacgaacgtattgctatgattaactcccacgatactatgcatattattaatcattaacttgcagactatacctagtgctattttgacatactcatgttcttgtgtaattgcggtatctatattattaaagtacgtaaatctagctatagttttattatttaattttagataatataccgtctccttatttttaaaaattgccacatcctttattaaatcatgaatgggaatttctatgtcatcgttagtatattgtgaacaacaagagcagatatctataggaaagggtggaatgcgatacattgatctatgtagttttaaaacacacgcgaactttgaagaatttatataaatcattccatcgatacatccttctatgttgacatgtatatatccaggaattcttttattaatgtcaggaaatgtataaactaaaacattgcccgaaagcggtgcctctatctgcgttatatccgttcttaacttacaaaatgtaaccaatacctttgcatgacttgttttgttcggcaacgttagtttaaacttgacgaatggattaattacaatagcatgatccgcgcatctattaagtttttttactttaacgcccttgtatgtttttacagagactttatctaaatttctagtacttgtatgtgttataaatataacgggatatagaactgaatcacctaccttagatacccaattacattttatcagatccagataataaacaaattttgtcgccctaactaattctatattgttatatattttacaattggttatgatatcatgtaataacttggagtctaacgcgcatcgtcgtacgtttatacaattgtgatttagtgtagtatatctacacatgtatttttccgcactatagtattctggactagtgataaaactatcgttatatctgtcttcaatgaactcatcgagatattgctctctgtcatattcatacacctgcataaactttctagacatcttacaatccgtgttattttaggatcatatttacatatttacgggtatatcaaagatgttagattagttaatgggaatcgtctataataatgaatattaaacaattatatgaggacttttaccacaaagcatcataaaaatgagtcgtcgtctgatttatgttttaaatatcaaccgcaaatcaactcataaaatacaagagaatgaaatatatacatattttagtcattgcaatatagaccatacttctacagaacttgattttgtagttaaaaactatgatctaaacagacgacaacatgtaactgggtatactgcactacactgctatttgtataataattactttacaaacgatgtactgaagatattattaaatcatgacgtaaatgtaacgatgaaaaccagtagcggacgtatgcctgtttatatattgcttactagatgttgcaatatttcacatgatgtagtgatagatatgatagacaaagataaaaaccacttattacatagagactattccaacctattactagagtatataaaatctcgttacatgttattaaaggaagaggatatcgatgagaacatagtatccactttattagataagggaatcgatcctaactttaaacaagacggatatacagcgttacattattattatttgtgtctcgcacacgtttataaaccaggtgagtgtagaaaaccgataacgataaaaaaggccaagcgaattatttctttgtttatacaacatggagctaatctaaacgcgttagataattgtggtaatacaccattccatttgtatcttagtattgaaatgtgtaataatattcatatgactaaaatgctgttgacttttaatccgaatttcaaaatatgtaataatcatggattaacgcctatactatgttatataacttccgactacatacaacacgatattcttgttatgttaatacatcactatgaaacaaatgttggagaaatgccgatagatgagcgtcgtatgatcgtattcgagtttatcaaaacatattctacacgtccggcagattcgataacttatttgatgaataggtttaaaaatataaatatttatacccgctatgaaggaaagacattattacacgtagcatgtgaatataataatacacacgtaatagattatcttatacgtatcaacggagatataaatgcgttaaccgacaataacaaacacgctacacaactcattatagataacaaagaaaattccccgtataccatcgattgtttactgtatatacttagatatattgtagataagaatgtgataagatcgttggtggatcaacttccatctctacctatcttcgatataaaatcatttgagaaattcatatcctactgtatacttttagatgacacattttacgataggcacgttaagaatcgcgattctaaaacgtatcgatacgcattttcaaaatacatgtcgtttgataaatacgatggtataataactaaatgtcacgacgaaacaatgttactcaaactgtccactgttctagacactacactatatgcagttttaagatgccataattcgaaaaagttaagaagatacctcaacgagttaaaaaaatataataacgataagtcctttaaaatatattctaatattatgaatgagagataccttaatgtatattataaagatatgtacgtgtcaaaggtatatgataaactatttcctgttttcacagataaaaattgtctactaacattactaccttcagaaattatatacgaaatattatacatgctgacaattaacgatctttataatatatcgtatccacctaccaaagtatagttgtatttttctcatgcgatgtgtgtaaaaaaactgatattatataaatattttagtgccgtataataaagatgacgatgaaaatgatggtacatatatatttcgtatcattattgttattgctattccacagttacgccatagacatcgaaaatgaaatcacagaattcttcaataaaatgagagatactctaccagctaaagactctaaatggttgaatccagcatgtatgttcggaggcacaatgaatgatatagccgctctaggagagccattcagcgcaaagtgtcctcctattgaagacagtcttttatcgcacagatataaagactatgtggttaaatgggagaggctagaaaagaatagacggcgacaggtttctaataaacgtgttaaacatggtgatttatggatagccaactatacatctaaattcagtaaccgtaggtatttgtgtaccgtaactacaaagaatggtgactgtgttcagggtatagttagatctcatattaaaaaacctccttcatgcattccaaaaacatatgaactaggtactcatgataagtatggcatagacttatactgtggaattctttacgcaaaacattataataatataacttggtataaagataataaggaaattaatatcgacgacattaagtattcacaaacgggaaagaaattaattattcataatccagagttagaagatagtggaagatacaactgttacgttcattacgacgacgttagaatcaagaatgatatcgtagtatcaagatgtaaaatacttacggttataccgtcgcaagaccacaggtttaaactaatactagatccaaaaatcaacgtaacgataggagaacctgccaatataacatgcactgctgtgtcaacgtcattattgattgacgatgtactgattgaatgggaaaatccatccggatggcttataggattcgattttgatgtatactctgttttaactagtagaggcggtattaccgaggcgaccttgtactttgaaaatgttactgaagaatatataggtaatacatataaatgtcgtggacacaactattattttgaaaaaacccttacaactacagtagtattggagtaaatacacaatgcatttttatatacattactgaataattattattattatttatatcgtatttgtgctataacgcgactatctaggtatttgtatctcactgatagagaacatataaatatagactctattaaacagttgtgtaaaatatcaaatcctaatagatgtggatgtacggctttacatgagtacttttataattatagatcagtcaacggaaaatacaagtatagatacaacggttactatcaatattatttatctagcgattatgaaaattataatgaatattattatgatgattatgatagaactggtatgaacagtgagagtgataatatatcaatcaaaacagaatatgaattctatgatgaaacacaagatcaaagtacacaactagtaggttacgacattaaactcaaaaccaatgaggatgattttatggctatgatagatcagtgggtgtccatgattatatagatgaatcaattaataaagtagtatatggaagagagtctcacgtaagatggcgggatatatggcaagaacataatgatggcgtatacagtataggaaaggagtgcatagataatatatacgaagacaaccataccgtagacgaattctacaagatagacagcgtatcagatgtagatgacgcggaacacatatctccgataactaatgatgtatctacacaaacatgggaaaagaaatcagagttagatagatacatggaaatgtatcctcgtcatagatatagtaagcattctgtctttaagggattttctgacaaagttagaaaaaatgatttagacatgaatgtggtaaaagaattactttctaacggtgcatctctaacaattaaggatagcagtaataaggatccaataaccgtttattttcgaagaacgataatgaatttagaaatgattgatattattaacaaacatacaactattgatgaacgaaagtatatagtacactcctatctaaaaaattataaaaatttcgattatccatttttcaggaagttagttttgactaataaacattgtctcaacaattattataatataagcgacagcaaatatggaacaccgctacatatattggcgtctaataaaaaattaataactcctaattacatgaagttattagtgtataacggaaatgatataaacgcacgaggtgaagatacacaaatgcgaactccattacacaaatatttgtgtaaatttgtatatcataatattgaatatggtatccgatactataatgaaaagattatagacgcatttatagagttaggagccgatctaactattccaaataacgatggaatgataccagtagtttactgtatacactcaaatgcagaatatggttataacaatattactaacataaagataatacgtaaactacttaatcttagtagacgtgcgtcacataatctatttagagatcgagtcatgcacgattatataagtaatacatatattgatcttgagtgtttagatattattagatcgttggatggattcgatatcaatggttactttgaaggacgtacaccacttcattgcgctatacaacataacttcactcagattgctaagtacttattagatcgaggagctgatatagtcgtacccaacacattgattatacatcagtacatacagtaaatagcatagatatggaggaggatacaaatatttcaaataaagttataaggtacaacactgtcaataatatatggaagacattacctaacttctggactggaactataaatccaggcgtggtctcgcataaagatgatatatatgttgtatgcgacatcaaagatgaaaaaaatgttaagacttgtatatttagatataacacgaatacgtataacggatgggaattggttacgacgacagaaagcagattatcagctctgcatactattcttcatgacaataccataatgatgttacattgttatgaatcgtatatgttacaagatacatttaatgtgtacactcgcgaatggaatcatatgtgtcatcaacattcgaatagttatatcatgtacaatatactacccatctactaaatataatagaataaaataaatgagtatgatcattttagataacgattgattttatcattaccgcttcattcttatattctttgcttacggaacctatatttagaaacatctactaacgattttttatgcttgcattattaatggtatgtaatatgattgattgtgtacgcaataccaatttgttaagtatgaatacggggtacaaacataaactgaaatttaacattatttatttatgatatatatcgttatcgttattgtttggtctataccatggatatctttaaagaactaatcttaaaacaccctgatgaaaatgttttgatttctccagtttctattttatctactttatctattctaaatcatggagcagctggttctacagctgaacaactatcaaaatatatagagaatatgaatgagaatacacccgatgataagaaggatgacaataatgacatggacgtagatattccgtattgtgcgacactagctaccgcaaataaaatatacggtagcgatagtatcgagttccacgcctccttcctacaaaaaataaaagacgattttcaaactgtaaactttaataatgctaaccaaacaaaggaactaatcaacgaatgggttaagacgatgacaaatggtaaaattaattccttattgactagtccgctatccattaatactcgtatgacagttgttagcgccgtccattttaaagcaatgtggaaatatccattttctaaacatcttacatatacagacaagttttatatttctaagaatatagttaccagtgttgatatgatggtgggtaccgagaataacttgcaatatgtacatattaatgaattattcggaggattctctattatcgatattccatacgagggaaactctagtatggtaattatactaccggacgacatagaaggtatatataacatagaaaaaaatataacagatgaaaaatttaaaaaatggtgtggtatgttatctactaaaagtatagacttgtatatgccaaagtttaaagtggaaatgacagaaccgtataatctggtaccgattttagaaaatttaggacttactaatatattcggatattatgcagattttagcaagatgtgtaatgaaactatcactgtagaaaaatttctacatacgacgtttatagatgttaatgaggagtatacagaagcatcggccgttacaggagtatttatgactaacttttcgatggtatatcgtacgaaggtctacataaaccatccattcatgtacatgattaaagacaacacaggacgtatactttttatagggaaatactgctatccgcaataaatataaacaaatagacttttatcacgtttatctatgtctaaatattacaaatagtaatagtataaactaaagctgataatacttaaaaaaataataatatcatttacaattaatagtataaactaaaaattaaacaaatcgttattataagtaatatcaaaatgatgatatacggattaatagcgtgtcttatattcgtgacttcatccatcgctagtccactttatattcccgttattccacccattacggaagataaatcgttcaatagtgtagaggtattagtttccttgtttagagatgaccaaaaagactatacggtaacttctcagttcaataactacactatcgataccaaagactggactatcggcgtactatccacacctgatggtttggatataccattgactaatataacttattggtcacggtttactataggtcgtgcattgttcaaatcagagtctgaggatattttccaaaagaaaatgagtattctaggtgtttctatagaatgtaagaagtcgtcgacattacttacttttttgaccgtgcgtaaaatgactcgagtatttaataaatttccagatatggcttattatcgaggagactgtttaaaagccgtttatgtaacaatgacttataaaaatactaaaactggagagactgattacacgtacctctctaatggggggttgcctgcatactatcgtaatggggtcgatggttgattattgattagtatattccttattcacacaaaaagaacatttttataaacatgaaaccactgtctaaatgtaattatgatcttgatttatagatgaagatcagcctttagaggattttaaccagtatgtttaatatgaaaaaaataaacataacatattttgagattaagcgctattgtgcttaattattttgctctataaactgaatatatagccacaattattgacgggcttgtttatgaccggcaatcatgaatttacagaaattatctctggctatatatcttactgcgacatgttcgtggtgttatgaaacatgcataagaaaaactgcgttgtatcatgacattcaattggagcatgtagaagacaataaagatagtgtagcgtcgctaccgtacaagtagtcaatcaaagagaacgtagtagattgttggctacatttaattggacagatatagctgagggtgttagaaatgagttcattaaaatatgtgatatcaacggaacatatttatataattatactattgctgttagtataattattgattccacggaagaactaccaacagttactccaattacaacaacatatgaaccttctacatataattatactatcgatgatagcactgttattactactgaagaactacaagtgactcctcatatggatctccatcgatgatacatgtattaaaatactttccgaataagtcttttaaatattgtattaattatgaaaaactatgctatgcgagtatgatgcaaagatgtttaatgatacgatactagattttatctctagcgagagatgtcgttagaatcatttatcataactacgtttaataataattcatcaacgaatatcgataacatgtgtcatttatacgttaaagtctgtccgtcttctctattgtttagactgtttgtagaatgctgtgatataaacaaactagtagaaggtacgactccgttacactgttatctaatgaatgaaggatttgaatcatctgttttaaaaaacctattaaaggagtatgtcatgaatacgtttaatgttcatgacatccattacacaaatatttaactcatgatgaagttgagaatgatatgctttctgatagtatagatagctttagctaatataaaaatatattaatccactatatattctagacttgatttaaaaccgataaactactactacgtactgtataagttgttaaaaaaaggagcagaccctaattatgtagatgatagaggtaatacttttcttcattacttctgcatctatatgtccacttatgagaaaacgtcatttaataagatgcatcgtgaaaagaaatttattaaagagttggtaaaatatgaaaccgaaagtaaataatataggaaatacacctctacataactacgtatctcaatatgatatcactctcattcctcatccacaacccattaaaaaaatggaaattaaagccctctattagcataaacggctacaggtctacctttacaatggcctctccttgtgcccagttcagaccctgtcattgccacgctactaaggactccctgaataccgtggccgacgtcagacattgtctgactgaatacatcctgtgggtttctcatagatggacccatagagaaagcgcagggtctctctacaggcttctcatctctttcagaactgatgcaacggagctctttggtggtgagttgaaggattcacttccgtgggacaatatcgacaattgcgtggagatcattaaatgtttcatcagaaatgactccatgaaaaccgccgaagaacttcgtgcaatcattggactttgtactcaatcagctatcgtctctggaagagtcttcaacgataagtatatcgacatactacttatgctgcgaaagattctgaacgagaacgactatctcaccctcttggatcatatccgcactgctaaatactaaatctccttcatgctctctcactacactttttatcatcttatgaggaatgattgccttcatcatttttcgtgaaataggaataattagcaccagaatagctatggattgcacatgtattctatgtcgtctactggatgaagatgtgacgtacaaaaaaataaaactagaaattgaaacgtgtcacaacttatcaaaacatatagatagacgaggaaacaatgcgctacattgttacgtcttcaataaatgcgatacagacattaagattgttcgactgttactctctcgcggagtcgagagactttgtagaaacaacgaaggattaactccgctaggagcatacagtaagcatagatacgtaaaatctcaaattgtgcatctactgatatccagctattcgaattcctctaacgaactcaagtcgaatataaatgatttcgatctgtattcgtatatgtcttcggataatatcgacttacgtctgctaaaatacctaattgtggataaacggatacgtccgtccaagaatacgaattatgcaatcaatggtctcggattggtggatatatacgtaacgacgcctaatccgagaccagaagtattgctatggcttcttaaatcagaatgttacagcaccggttacgtatttcgtacctgtatgtacgacagtgatatgtgtaagaactctcttcattactatatatcgtctcatagagaatctcaatctctatccaaggatgtaattaaatgtttgatcaataacaatgtttccatccatggcagagacgaaggaggatctttacccatccaatactactggtcttgctcaaccatagatatagagattgttaaattattaataaaggatgtggacacgtgtagagtatacgacgtcagccctatattagaggcggattatctaaacaagcgatttagagtaaccccatataatgtagacatggaaatcgttaatcttcttattgagagacgtcatactcttgtcgacgtaatgcgtagtattacttcttacgattccagagactataaccactacatcatcgataacattctaaagagatttagacaacaggatgaatccatcgtacaagccatgttgataaactacttacattacggcgatatggtcgttcgatgcatgttagataacggacaacaactatcctctgcacgactactttgttaataataatctcgtcgatgtaaacgtcgtaaggtttatcgtggaaaataatggacacatggctgtaaatcacgtatcgaacaatggccgtctatgtatgtacggtctgatattatcgagatttaataattgcgggtatcactgttatgaaaccatactaatagatgtatttgatatactaagcaagtacatggataatatagatatgatcgataatgagaataaaactctactatattacgcggtcgatgtcaataatatacaatttgcaaagcggttattggaatatggagcgagtgttacaacatcacgctcgataatcaatacggccatccagaaaagtagttacagaagagaaaacaaaacgaggatagttgatttattacttagctaccatcccactctagagactatgattgacgcatttaatagagatatacgctatctatatcctgaaccattattcgcctgtatcagatacgccttaatcctagatgatgattttccttctaaagtaagtatgatatctccggtcgtcataaggaactaaagcgctatagagtagacattaatagaatgaagaatgcctacatatcaggcgtctccatgtttgatatattatttaaacgaagcaaacgccacagattgagatacgcaaagaatccgacatcaaatggtacaaaaaagaactaacgtccatcattacagaaactgtaaagaacaatgagaggatcgactccatagtggacaacattaatacagacgataacttgatttcgaaattacccatggagatactttattactccattaaataatttatcatggagcgataatgtcctgtttcatttgtttccatgacatattacaaaatcgattccgtccaagatgataaaaacatttaccggcatcataaacacggagtttattttatatgtctcgcataaacattactaaaaaaatatattgttcggttttctttcacatctttaattatgaaaaagtaaatcattatgagatggacgagattgtacgcatcgttcgcgacagtatgtggtacatacctaacgtatttatggacgacggtaagaatgaaggtcacgtttctgtcaacaatgtttgtcatatgtattttacgttctttgatgtggatacatcgtctcatctgtttaagctagttattaaacactgcgatctgaataaacgaggtaactctccattacattgctatacgatgaatacacgatttaatccatctgtattaaagatattgttacaccacggcatgcgtaactttgatagcaaggatgaaaaaggacatattcctctacaccactatctgattcattcactatcaatcgataacaagatctttgatatactaacggacaccattgatgactttagtaaatcatccgatctattgctgtgttatcttagatataaattcaatgggagcttaaactattacgttctgtacaaaggatccgaccctaattgcgtcgacgaggatggactcacttctcttcattactactgtaaacacatatccacgttctacaaaagcaattattacaagttaagtcacactaagatgcgagccgagaagcgattcatctacgcgataatagattatggagcaaacattaacgcggttacacacttaccttcaacagtataccaaacatagtcctcgtgtggtgtatgctcttttatctcgaggagccgatacgaggatacgtaataatcttgattgtacacccatcatggaacgattgtgcaacaggtcatattctcataatgttactcaattggcacgaacaaaaggaagaaggacaacatctactttatctattcataaaacataatcaaggatacactctcaatatactacggtatctactagataggttcgacattcagaaagacgaatactataataccgcctttcaaaattgtaacaacaatgttgcctcatacatcggatacgacatcaaccttccgactaaagacggtattcgacttggtgtttgaaaacagaaacatcatatacaaggcggatgttgtgaatgacatcatccaccacagactgaaagtatctctacctatgattaaatcgttgttctacaagatgtcagaattctctccctacgacgattactacgtaaaaaagatactagcctactgcctattaagggacgagtcattcgcggaactacatagtaaattctgtttaaacgaggactataaaagtgtatttatgaaaaatatatcattcgataagatagattccatcatcgtgacataagtcgccttaaagagattcgaatctccgacaccgacctgtatacggtatcacagctatcttaaagccatacattcggacagacacatttcatttcccatgtacgacgatctcatagaacagtgccatctatcgatggagcataaaagtaaactcgtcgacaaagcactcaataaattagagtctaccatcggtcaatctagactatcgtatttgcctccggaaattatgcgcaatatcatctaaacagtatgttgtacggaaagaaccattacaaatattatccatgatagaaagaaaatatctatatgattggagaagtaggaaacaggaacaagacgacgattactacattattaaatcatgaagtccgtattatactcgtatatattgtttctctcatgtataataataaacggaagagatatagcaccgcatgcaccatccgatggaaagtgtaaagacaacgaatacaaacgccataatttgtgtccgggaacatacgcttccagattatgcgatagcaagactaacacacgatgtacaccctgtggttcgggtaccttcacatctcgcaataatcatttacccgcttgtctaagttgtaacggaagacgcgatcgtgtaacacgactcacaatagaatctgtgaatgctctcccggatattattgtcttctcaaaggatcatccggatgcaaggcatgtgtttcccaaacaaaatgtggaataggatacggagtatccggagacgtcatctgttctccgtgtggtctcggaacatattctcacaccgtctcttccgcagataaatgcgaacccgtacccagtaatacctttaactatatcgatgtggaaattaatctgtatcccgtcaacgacacgtcgtgtactcggacgaccactaccggtctcagtgaatccatctcaacgtcggaactaactattactatgaatcataaagactgtaatcccgtatttcgtgaggaatacttctctgtccttaataaggtagcaacttcaggtttctttacaggagaaaggtgtgcactctgaatttcgagattaaatgcaataacaaagattcttcctccaaacagttaacgaaagcaaagaatgatgacggtatcatgccgcattcggagacagtaactctagtgggcgactgtatatctagcgtcgacatctatatactatatagtaataccaatactcaagactacgaaactgatacaatctcttatcatgtgggtaatgttctcgatgtcgatagccatatgcccggtagttgcgatatacataaactgatcactaattccaaacccacccgctttttatagtaagtttttcacccataaataataaatacaataattaatttctcgtaaaagtagaaaatatattctaatttattgcatggtaaggaagtagaatcataaagaacagtactcaatcaatagcaattatgaaacaatatatcgtcctggcatgcatgtgcctgccagtcttcagcaatcatcctcatcctcatcctcgtgtacggaagaagaaaacaaacatcatatgggaatcgatgttattatcaaagtcacaaagcaagaccaaacaccgaccaatgataagatttgccaatccgtaacggaaattacagagtccgagtcagatccaaatcccgaggtggaatcagaagatgattccacatcagtcgaggatgtagatcctcctaccacttattactccatcatcggtggaggtctgagaatgaactttggattcaccaaatgtcctcagattaaatccatctcagaatccgctgatggaaacacagtgaatgctagattgtccagcgtgtccccaggacaaggtaaggactctcccgcgatcactcatgaagaagctcttgctatgatcaaagactgtgaggtgtctatcgacatcagatgtagcgaagaagagaaagacagcgacatcaagacccatccagtactcgggtctaacatctctcataagaaagtgagttacgaagatatcatcggttcaacgatcgtcgatacaaaatgtgtcaagaatctagagtttagcgttcgtatcggagacatgtgcaaggaatcatctgaacttgaggtcaaggatggattcaagtatgtcgacggatcggcatctgaaggtgcaaccgatgatacttcactcatcgattcaacaaaactcaaagcgtgtgtctgaatcgataactctattcatctgaaattggatgagtagggttaatcgaacgattcaggcacaccacgaattaaaaaagtgtaccggacactatattccggtttgcaaaacaaaaatgttcttaactacattcacaaaaagttacctctcgcgacttcttctttttctgtctcaatagtgtgatacgattatgacactattcctattcctattcctatttcctttcagggtatcacaaaaatattaaacctctttctgatggtctcataaaaaaagttttacaaaaatatttttattctctttctctctttgatggtctcataaaaaaagttttacaaaaatatttttattctctttctctctttgat

SEQ ID NO: 89 - DNA, 200195 bp, Vaccinia virus
  source 1..200195: mol_type = genomic DNA
  misc_feature 1..200195: note = VIR114
atcaaagagagaaagagaataaaaatatttttgtaaaactttttttatgagaccatcaaagagagaaagagaataaaaatatttttgtaaaactttttttatgagaccatcagaaagaggtttaatatttttgtgataccctgaaaggaaataggaataggaataggaatagtgtcataatcgtatcacactattgagacagaaaaagaagaagtcgcgagaggtaactttttgtgaatgtagttaagaacatttttgttttgcaaaccggaatatagtgtccggtacacttttttaattcgtggtgtgcctgaatcgttcgattaaccctactcatccaatttcagatgaatagagttatcgattcagacacacgctttgagttttgttgaatcgatgagtgaagtatcatcggttgcaccttcagatgccgatccgtcgacatacttgaatccatccttgacctcaagttcagatgattccttgcacatgtctccgatacgaacgctaaactctagattcttgacacattttgtatcgacgatcgttgaaccgatgatatcttcgtaactcactttcttatgagagatgttagacccgagtactggatgggtcttgatgtcgctgtctttctcttcttcgctacatctgatgtcgatagacacctcacagtctttgatcatagcaagagcttcttcatgagtgatcgcgggagagtccttaccttgtcctggggacacgctggacaatctagcattcactgtgtttccatcagcggattctgagatggatttaatctgaggacatttggtgaatccaaagttcattctcagacctccaccgatgatggagtaataagtggtaggaggatctacatcctcgactgatgtggaatcatcttctgattccacctcgggatttggatctgactcggactctgtaatttccgttacggattggcaaatcttatcattggtcggtgtttggtcttgctttgtgactttgataataacatcgattcccatatgatgtttgttttcttcttccgtacacgaggatgaggatgaggatgattgctgaagactggcaggcacatgcatgccaggacgatatattgtttcataattgctattgattgagtactgttctttatgattctacttccttaccatgcaataaattagaatatattttctacttttacgagaaattaattattgtatttattatttatgggtgaaaaacttactataaaaagcgggtgggtttggaattagtgatcagtttatgtatatcgcaactaccgggcatatggctatcgacatcgagaacattacccacatgataagagattgtatcagtttcgtagtcttgagtattggtattactatatagtatatagatgtcgacgctagatatacagtcgcccactagagttactgtctccgaatgcggcatgataccgtcatcattctttgctttcgttaactgtttggaggaagaatctttgttattgcatttaatctcgaaattcagagtgcacacctttctcctgtaaagaaacctgaagttgctaccttattaaggacagagaagtattcctcacgaaatacgggattacagtctttatgattcatagtaatagttagttccgacgttgagatggattcactgagaccggtagtggtcgtccgagtacacgacgtgtcgttgacgggatacagattaatttccacatcgatatagttaaaggtattactgggtacgggttcgcatttatctgcggaagagacggtgtgagaatatgttccgagaccacacggagaacagatgacgtctccggatactccgtatcctattccacattttgtttgggaaacacatgccttgcatccggatgatcctttgagaagacaataatatccgggagagcattcacagattctattgtgagtcgtgttacacgatcgcgtcttccgttacaacttagacaagcgggtaaatgattattgcgagatgtgaaggtacccgaaccacagggtgtacatcgtgtgttagtcttgctatcgcataatctggaagcgtatgttcccggacacaaattatggcgtttgtattcgttgtctttacactttccatcggatggtgcatgcggtgctatatctcttccgtttattattatacatgagagaaacaatatatacgagtataatacggacttcatgatttaataatgtagtaatcgtcgtcttgttcctgtttcctacttctccaatcatatagatattttctttctatcatggataatatttgtaatggttctttccgtacaacatactgtttagatgatattgcgcataatttccggaggcaaatacgatagtctagattgaccgatggtagactctaatttattgagtgctttgtcgacgagtttacttttatgctccatcgatagatggcactgttctatgagatcgtcgtacatgggaaatgaaatgtgtctgtccgaatgtatggctttaagatagctgtgataccgtatacaggtcggtgtcggagattcgaatctctttaaggcgacttatgtcacgatgatggaatctatcttatcgaatgatatatttttcataaatacacttttatagtcctcgtttaaacagaatttactatgtagttccgcgaatgactcgtcccttaataggcagtaggctagtatcttttttacgtagtaatcgtcgtagggagagaattctgacatcttgtagaacaacgatttaatcataggtagagatactttcagtctgtggtggatgatgtcattcacaacatccgccttgtatatgatgtttctgttttcaaacaccaagtcgaataccgtctttagtcggaaggttgatgtcgtatccgatgtatgaggcaacattgttgttacaattttgaaaggcggtattatagtattcgtctttctgaatgtcgaacctatctagtagataccgtagtatattgagagtgtatccttgattatgttttatgaatagataaagtagatgttgtccttcttccttttgttcgtgccaattgagtaacattatgagaatatgacctgttgcacaatcgttccatgatgggtgtacaatcaagattattacgtatcctcgtatcggctcctcgagataaaagagcatacaccacacgaggactatgtttggtatactgttgaaggtaagtgtgtaaccgcgttaatgtttgctccataatctattatcgcgtagatgaatcgcttctcggctcgcatcttagtgtgacttaacttgtaataattgcttttgtagaacgtggatatgtgtttacagtagtaatgaagagaagtgagtccatcctcgtcgacgcaattagggtcggatcctttgtacagaacgtaatagtttaagctcccattgaatttatatctaagataacacagcaatagatcggatgatttactaaagtcatcaatggtgtccgttagtatatcaaagatcttgttatcgattgatagtgaatgaatcagatagtggtgtagaggaatatgtcctttttcatccttgctatcaaagttacgcatgccgtggtgtaacaatatctttaatacagatggattaaatcgtgtattcatcgtatagcaatgtaatggagagttacctcgtttattcagatcgcagtgtttaataactagcttaaacagatgagacgatgtatccacatcaaagaacgtaaaatacatatgacaaacattgttgacagaaacgtgaccttcattcttaccgtcgtccataaatacgttaggtatgtaccacatactgtcgcgaacgatgcgtacaatctcgtccatctcataatgatttactttttcataattaaagatgtgaaagaaaaccgaacaatatatttttttagtaatgtttatgcgagacatataaaataaactccgtgtttatgatgccggtaaatgtttttatcatcttggacggaatcgattttgtaatatgtcatggaaacaaatgaaacaggacattatcgctccatgataaattatttaatggagtaataaagtatctccatgggtaatttcgaaatcaagttatcgtctgtattaatgttgtccactatggagtcgatcctctcattgttctttacagtttctgtaatgatggacgttagttcttttttgtaccatttgatgtcggattctttgcgtatctcaatctgtggcgtttgcttcgtttaaataatatatcaaacatggagacgcctgatatgtaggcattcttcattctattaatgtctactctatagcgctttagttccttatgacgaccggagatatcatacttactttagaaggaaaatcatcatctaggattaaggcgtatctgatacaggcgaataatggttcaggatatagatagcgtatatctctattaaatgcgtcaatcatagtctctagagtgggatggtagctaagtaataaatcaactatcctcgttttgttttctcttctgtaactacttttctggatggccgtattgattatcgagcgtgatgttgtaacactcgctccatattccaataaccgctttgcaaattgtatattattgacatcgaccgcgtaatatagtagagttttattctcattatcgatcatatctatattatccatgtacttgcttagtatatcaaatacatctattagtatggtttcataacagtgatacccgcaattattaaatctcgataatatcagaccgtacatacatagacggccattgttcgatacgtgatttacagccatgtgtccattattttccacgataaaccttacgacgtttacatcgacgagattattattaacaaagtagtcgtgcagaggatagttgttgtccgttatctaacatgcatcgaacgaccatatcgccgtaatgtaagtagtttatcaacatggcttgtacgatggattcatcctgttgtctaaatctctttagaatgttatcgatgatgtagtggttatagtctctggaatcgtaagaagtaatactacgcattacgtcgacaagagtatgacgtctctcaataagaagattaacgatttccatgtctacattatatggggttactctaaatcgcttgtttagataatccgcctctaatatagggctgacgtcgtatactctacacgtgtccacatcctttattaataatttaacaatctctatatctatggttgagcaagaccagtagtattggatgggtaaagatcctccttcgtctctgccatggatggaaacattgttattgatcaaacatttaattacatccttggatagagattgagattctctatgagacgatatatagtaatgaagagagttcttacacatatcactgtcgtacatacaggtacgaaatacgtaaccggtgctgtaacattctgatttaagaagccatagcaatacttctggtctcggattaggcgtcgttacgtatatatccaccaatccgagaccattgattgcataattcgtattcttggacggacgtatccgtttatccacaattaggtattttagcagacgtaagtcgatattatccgaagacatatacgaatacagatcgaaatcatttatattcgacttgagttcgttagaggaattcgaatagctggatatcagtagatgcacaatttgagattttacgtatctatgcttactgtatgctcctagcggagttaatccttcgttgtttctacaaagtctctcgactccgcgagagagtaacagtcgaacaatcttaatgtctgtatcgcatttattgaagacgtaacaatgtagcgcattgtttcctcgtctatctatatgttttgataagttgtgacacgtttcaatttctagttttatttttttgtacgtcacatcttcatccagtagacgacatagaatacatgtgcaatccatagctattctggtgctaattattcctatttcacgaaaaatgatgaaggcaatcattcctcataagatgataaaaagtgtagtgagagagcatgaaggagatttagtatttagcagtgcggatatgatccaagagggtgagatagtcgttctcgttcagaatctttcgcagcataagtagtatgtcgatatacttatcgttgaagactcttccagagacgatagctgattgagtacaaagtccaatgattgcacgaagttcttcggcggttttcatggagtcatttctgatgaaacatttaatgatctccacgcaattgtcgatattgtcccacggaagtgaatccttcaactcaccaccaaagagctccgttgcatcagttctgaaagagatgagaagcctgtagagagaccctgcgctttctctatgggtccatctatgagaaacccacaggatgtattcagtcagacaatgtctgacgtcggccacggtattcagggagtccttagtagcgtggcaatgacagggtctgaactgggcacaaggagaggccattgtaaaggtagacctgtagccgtttatgctaatagagggctttaatttccatttttttaatgggttgtggatgaggaatgagagtgatatcatattgagatacgtagttatgtagaggtgtatttcctatattatttactttcggtttcatattttaccaactctttaataaatttcttttcacgatgcatcttattaaatgacgttttctcataagtggacatatagatgcagaagtaatgaagaaaagtattacctctatcatctacataattagggtctgctcctttttttaacaacttatacagtacgtagtagtagtttatcggttttaaatcaagtctagaatatatagtggattaatatatttttatattagctaaagctatctatactatcagaaagcatatcattctcaacttcatcatgagttaaatatttgtgtaatggatgtcatgaacattaaacgtattcatgacatactcctttaataggttttttaaaacagatgattcaaatccttcattcattagataacagtgtaacggagtcgtaccttctactagtttgtttatatcacagcattctacaaacagtctaaacaatagagaagacggacagactttaacgtataaatgacacatgttatcgatattcgttgatgaattattattaaacgtagttatgataaatgattctaacgacatctctcgctagagataaaatctagtatcgtatcattaaacatctttgcatcatactcgcatagcatagtttttcataattaatacaatatttaaaagacttattcggaaagtattttaatacatgtatcatcgatggagatccatatgaggagtcacttgtagttcttcagtagtaataacagtgctatcatcgatagtataattatatgtagaaggttcatatgttgttgtaattggagtaactgttggtagttcttccgtggaatcaataattatactaacagcaatagtataattatataaatatgttccgttgatatcacatattttaatgaactcatttctaacaccctcagctatatctgtccaattaaatgtagccaacaatctactacgttctctttgattgactacttgtacggtagcgacgctacactatctttattgtcttctacatgctccaattgaatgtcatgatacaacgcagtttttcttatgcatgtttcataacaccacgaacatgtcgcagtaagatatatagccagagataatttctgtaaattcatgattgccggtcataaacaagcccgtcaataattgtggctatatattcagtttatagagcaaaataattaagcacaatagcgcttaatctcaaaatatgttatgtttatttttttcatattaaacatactggttaaaatcctctaaaggctgatcttcatctataaatcaagatcataattacatttagacagtggtttcatgtttataaaaatgttctttttgtgtgaataaggaatatactaatcaataatcaaccatcgaccccattacgatagtatgcaggcaaccccccattagagaggtacgtgtaatcagtctctccagttttagtatttttataagtcattgttacataaacggcttttaaacagtctcctcgataataagccatatctggaaatttattaaatactcgagtcattttacgcacggtcaaaaaagtaagtaatgtcgacgacttcttacattctatagaaacacctagaatactcattttcttttggaaaatatcctcagactctgatttgaacaatgcacgacctatagtaaaccgtgaccaataagttatattagtcaatggtatatccaaaccatcaggtgtggatagtacgccgatagtccagtctttggtatcgatagtgtagttattgaactgagaagttaccgtatagtctttttggtcatctctaaacaaggaaactaatacctctacactattgaacgatttatcttccgtaatgggtggaataacgggaatataaagtggactagcgatggatgaagtcacgaatataagacacgctattaatccgtatatcatcattttgatattacttataataacgatttgtttaatttttagtttatactattaattgtaaatgatattattatttttttaagtattatcagctttagtttatactattactatttgtaatatttagacatagataaacgtgataaaagtctatttgtttatatttattgcggatagcagtatttccctataaaaagtatacgtcctgtgttgtctttaatcatgtacatgaatggatggtttatgtagaccttcgtacgatataccatcgaaaagttagtcataaatactcctgtaacggccgatgcttctgtatactcctcattaacatctataaacgtcgtatgtagaaatttttctacagtgatagtttcattacacatcttgctaaaatctgcataatatccgaatatattagtaagtcctaaattttctaaaatcggtaccagattatacggttctgtcatttccactttaaactttggcatatacaagtctatacttttagtagataacataccacaccattttttaaatttttcatctgttatatttttttctatgttatatataccttctatgtcgtccggtagtataattaccatactagagtttccctcgtatggaatatcgataatagagaatcctccgaataattcattaatatgtacatattgcaagttattctcggtacccaccatcatatcaacactggtaactatattcttagaaatataaaacttgtctgtatatgtaagatgtttagaaaatggatatttccacattgctttaaaatggacggcgctaacaactgtcatacgagtattaatggatagcggactagtcaataaggaattaattttaccatttgtcatcgtcttaacccattcgttgattagttcctttgtttggttagcattattaaagtttacagtttgaaaatcgtcttttattttttgtaggaaggaggcgtggaactcgatactatcgctaccgtatattttatttgcggtagctagtgtcgcacaatacggaatatctacgtccatgtcattattgtcatccttcttatcatcgggtgtattctcattcatattctctatatattttgatagttgttcagctgtagaaccagctgctccatgatttagaatagataaagtagataaaatagaaactggagaaatcaaaacattttcatcagggtgttttaagattagttctttaaagatatccatggtatagaccaaacaataacgataacgatatatatcataaataaataatgttaaatttcagtttatgtttgtaccccgtattcatacttaacaaattggtattgcgtacacaatcaatcatattacataccattaataatgcaagcataaaaaatcgttagtagatgtttctaaatataggttccgtaagcaaagaatataagaatgaagcggtaatgataaaatcaatcgttatctaaaatgatcatactcatttattttattctattatattaacacatacatttttaacagcaacacattcaatattgtattgttatttttatattatttacacaattaacaatatattattagtttatattactgaattaataatataaaattcccaatcttgtcataaacacacactgagaaacagcataaacacaaaatccatcaaaaatgtcgatgaaatatctgatgttgttgttcgctgctatgataatcagatcattcgccgatagtggtaacgctatcgaaacgacattgccagaaattacaaacgctacaacagatattccagctatcagattatgcggtccagagggagatggatattgtttacacggtgactgtatccacgctagagatatcgacggtatgtattgtagatgctctcatggttatacaggcattagatgtcagcatgtagtattagtagactatcaacgttcagaaaaaccaaacactacaacgtcatatatcccatctcccggtattgtgcttgtattagtaggcattattattatgtgttgtctattatctgtttataggttcactcgaagaactaataaactacctctacaagatatggttgtgccataatttttataaatttttttatgagtatttttacaaaaaaaatgtataaagtgtatgtcttatgtatatttataaaaatgctaagtatgcgatgtatctatgttatttgtatttatctaaacaatacctctacctctagatattatacaaaaattttttatttcggcatattaaagtaaaatctagttaccttgaaaatgaatacagtgggtggttccgtatcaccagtaagaacataatagtcgaatacagtatccgattgagattttgcatacaatactagtctagaaagaaatttgtaatcattttctgtgacgggagtccatatatctgtatcatcgtctagtttatcagtgtcccatgctatatttctgttatcatcattagttaatgaaaataactctcgtgcttcagaaaagtcaaatattgtatccatacatacatctccaaaactatcgcttatacgtttatctttaacgatacctatacctagatggttatttactaacagacattttccagatctattgactataactcctatagtttccacatcaaccaagtaatgatcatctattgttatataacaataacataactcttttccatttttatcagtatgtatatctatatcaacgtcgtcgttgtagtgaatagtagtcattgatctattatatgaaacggatatgtctagaacggcaattgtcttacgtccagttaacactttcgttgatttaaagtctagagtctttgcaaacataatatccttatccgactttatatttcctgtagggtggtataattttattttgcctccacatatcggtgtttccaaatatattactagacaatattccatatagttattagttaagggtacccaattagaacacgtacgcttattatcatcatttggatcgtatttcataaaagttattgtactatcgatgtcaacacattctacattttttaatcgtctatatagtatttttctgatattttctataatatcagaattgtcttccatcggaagttgtatactatcggaatcagttacatgtttaaataattctctgatgtcattccttatacaatcaaattcattattaaacagtttaatagtctgtagacctttatcgtcgtaaatatccattgtcttattagttacgcttatttttatgtgttttacgttgctttattatattttataagaatgattgtttgacgaatcacgagaactattaagacacattattaggtatatattataaaaaagtttttgattacgatgttataagaggaaagaggacacattaacatcatacatcaattaactacattcttataacatcgtaatcaaaagaattgcaattttgatgtataacaactgtcaatgggttatggaattgtatattacatattatacggtatgttggtaacgacaaataccgatcggtaatcgtttgccggtgtaatagaattatatatatctatctattacaccggctgagtatacataataataagttgtggtagtatgatctccatatttataatttaggactttgtattcagtatttttggaatcataaaaaataaaaaaaagttttactaatttaaaatttaaaaagtatttacatttttttcactgtttagtcgcggatatggaattcgatcctgccaaaatcaatacatcatctatagatcatgtaacaatattacaatacatagatgaaccaaatgatataagactaacagtatgcattatccgaaatattaataacattacatattatatcaatatcacaaaaataaatacacatttggctaatcaatttcgggcttggaaaaaacgtatcgccggaagggactatatgactaacttatctagagatacaggaatacaacaatcaaaacttactgaaactatacgtaactgtcaaaaaaatagaaacatatatggtctatatatacactacaatttagttattaatgtggttattgattggataaccgatgtgattgttcaatcaatattaagagggttggtaaattggtacatagctaataatacctatactccaaatacacccaataatacaacaaccatttctgagttggatatcatcaaaatactaaataaatacgaggacgtgtatagagtaagtaaagaaaaagaatgtggaatttgctatgaagttgtttactcaaaacgattagaaaacgatagatactttggtttattggattcgtgtactcatatattttgcataacatgcatcaatatatggcataaaacacgaagagaaaccggtgcgtcggataattgtcctatatgtcgtacccgttttagaaacataacaatgagcaagttctataagctagttaactaataaataaaaagtttaatttgttgacgacgtatgtcgttattttttctcgtataaaagattaatttgattctaatataatctttagtattggataaatatcaattcaaattaattccattagattatatcataaataaaaatagtagcacgcactacttcagccaaatattcttttttgaaacgccatctatcgtagtgaggacacaagtgaacctataatgagcaaatttattagtatcggttacatgaaggactttacgtagagtggtgattccactatctgtggtacgaacggtttcatcttctttgatgccatcacccagatgttctataaacttggtatcctcgtccgatttcatatcctttgccaaccaatacatatagctaaactcaggcatatgttccacacatcctgaacaatgaaattctccagaagatgttacaatgtctagatttggacatttggtttcaaccgcgttaacatatgagtgaacacacccatacatgaaagcgatgagaaataggattttcatcttgccaaaatatcactagaaaaaatttatttatcaattttaaaggtataaaaaatacttattgttgctcgaatattttgtatttgatggtatacggaagattagaaatgtaggtattatcatcaactgattctatggttttatgtattctatcatgtttcactattgcgttggaaataatatcatatgcttccacatatattttattttgttttaactcataatactcacgtaattctggattattggcatatctgtgaataattttagctccatgatcagtaaatattaatgagaacatagtattaccacctaccattatttttttcatttcgttcaattcttgattgcaaagatctatataatcattatagcgttgacttatggactctggaatcttagacgatgtacagtcatctataatcatggcatatttaatacattgttttatagcatagtagttatctacgatgttagatatttctctcaatgaatcaatcacacaatctaatgtaggtttatgacataatagcattttcagcagttcaatgtttctagattcgttgatggcaatggctatacatgtatatccgttatttgatctaatgttgacatctgaaccggattctagcagtaaagatactagagattgtttattatatctaacagccttgtgaagaagtgtttctcctcgtttgtcaatcatgttaatgtctttaagataaggtaggcaaatgtttatagtactaagaattgggcaagcataagacatgtcacaaagaccctttttgtatgtataagtgtagaaattataacatccatagttggatttacataggtgtccaatcgggatctctccatcatcgagatgattgacggcatctcccccttccttttttagtagatatttcatcgtgtaagaatcaatattaatatttctaaagtatccgtgtatagcctctttatttaccacagctccatattccaacatgcattccactaaagggatatcgatatcgccgaatgtcatatactcaattagtatatgttggaggacatccgagttcattgttttcaatatcaaagagatggtttccttatcatttctccatagtggtacaatactacacattattccgtgaggctttccattctccaaaaacaatttgaccaaatctacatctttattgtatctataatcactatttagataatcagccataattcctcgagtgcaacatgttagatcgtctatatatgaataagccgtgttatctattcctttcattaacaatttaacgatgtctatatctatatgagatgacttaatataatattgaagagctgtacaatagtttttatctatagaagacggcttgattccgtgattaattagacatttaacaacttccggacgcacatatgctctcgtatccgactctgaatacagatgagagatgatatacagatgcaatacggtaccgcaatttcgtagttgataatcatcatacgcgtatccgtactcgtcctcataaagaacactgcagccattttctatgaacaaatcaataattttaggaacaggatcattgtcattacataattttctataactgaacgatggttttcacatttaacactcaagtcaaatccatgttctaccaacacctttatcaagtcaacgtctacatttttggatttcatatagctgaatatattaaagtcatttatgttgctaaatccagtggcttctagtagagccatcgctatatcctttaactttaacatgtctactatttgtgtattcttctaatggggtagctgtctccaatttttgcgtaatggattagtgccactgtctagtagtagtttgacgacctcgacattattacaatgctcattaaaaaggtatgcgtgtaaagcattattcttgaattggttcctggtatcattaggatctctgtctctcaacatctgtttaagttcatcgagagccacctcctcattttccaaatagtcaaacattttgactgaatagaagtgaatgagctactgtgaactctatacacccacacaactaatgtcattaaatattatttttttgaatgtatttataccatgtcaaaaacttgtacaattattaataaaaataatttagtgtttaaattttaccagttccagattttacacctccgttaaccccactttttacaccactggacgaccctcctccccacattccaccgccaccagatgtataagttttagatcctttattactaccatcatgtccatggataaagacactccacatgccgccactaccccctttagaagacatattaataagacttaagagttaaggacaagtttaacaataaaattaatcacgagtaccctactaccaacctacactattatatgattatagtttctatttttacagtaccttaactaaagtttctagtcacaagagcaatactaccaacctacactattatatgattatagtttctatttttataggaacgcgtacgagaaaatcaaatgtctaatttctaacggtagtgttgataaacgattatcgtcaatggatacctcctctatcatgtcgtctattttcttactttgttctattaacttattagcattatatattatttgattataaaacttatattgcttattagcccaatctgtaaatatcggattattaacatatcgtttctttgtaggtttatttaacttgtacatcactgtaagcatgtccgtaccatttattttaatttgacgcatatccgcaatttctttttcgcagtcggttataaattctatatatgatggatacatgctacatgtgtacttataatcgactaatatgaagtacttgatacatattttcagtaacgatttattattaccacctatgaataagtacctgtgatcgtctaggtaatcaactgttttcttaatacattcgatggttggtaatttactcagaataatttccaatatcttaatatataattctgctatttctggaatatatttatctgccagtataacacaaatagtaatacatgtaaacccatattttgttattatattaatgtctgcgccattatctattaaccattctactaggctgacactatgcgacttaatacaatgataaagtatactacatccatgtttatctattttgtttatatcatcaatatacggcttacaaagttttagtatcgataacacatccaactcacgcatagagaaggtagggaataatggcataatatttattaggttatcatcattgtcattatctacaactaagtttccattttttaaaatatactcgacaactttaggatctctattgccaaatttttgaaaatatttatttatatgcttaaatctatataatgtagctccttcatcaatcatacatttaataacattgatgtatactgtatgataagatacatattctaacaatagatcttgtatagaatctgtatatcttttaagaattgtggatattaggatattattacgtaaactattacacaattctaaaatataaaacgtatcacggtcgaataatagttgatcaactatataattatcgattttgtgatttttcttcctaaactgtttacgtaaatagttagatagaatattcattagttcatgaccactatagttactatcgaataacgcgtcaaatatttcccgtttaatatcgcatttgtcaagataataatagagtgtggtatgttcacgataagtataataacgcatctctttttcgtgtgaaattaaatagtttatcacgtccaaagatgtagcataaccatcttgtgacctagtaataatataataatagagaactgttttacccattctatcatcataatcagtggtgtagtcgtaatcgtaatcgtctaattcatcatcccaattataatattcaccagcacgtctaatctgttctattttgatcttgtatccatactgtatgttgctacatgtaggtattcctttatccaataatagtttaaacacatctacattgggatttgatgttgtagcgtatttctctacaatattaataccatttttgatactatttatttctatacctttcgaaattagtaatttcaataagtctatatcgatgttatcagaacatagatattcgaatatatcaaaatcattgatatttttatagtcgactgacgacaataacaaaatcacaacatcgtttttgatattattatttttcttggtaacgtatgcctttaatggagtttcaccatcatactcatataatggatttgcaccactttctatcaatgattgtgcactgctggcatcgatgttaaatgttttacaactatcatagagtatcttatcgttaaccatgattggttgttgatgctatcgcattttttggtttctttcatttcagttatgtatggatttagcacgtttgggaagcataagctcatatgatttcagtactgtagtgtcagtactattagtttcgatcagatcaatgtctagatctatagaatcaaaacacgataggtcagaagataatgaatatctgtaggcttcttgttgtactgtaacttctcgttttgttagatggttgcatcgtgctttaacatcaatggtacaaattttatcctcgctttgtgtatcatattcgtccctactataaaattgtatattcagattatcatgagatgtgtatacgctaacggtatcaataaacggagcacaccatttagtcataaccgtaatccaaaaatttttaaagtatatcttaacgaaagaagttgtgtcattgtctacggtgtatggtactagatcctcataagtgtatatatctagagtaatgtttaatttatcaaatggttgataatatggatcctcatggcaatttcctaagacgaaaataagacataaacacgcaataaatctaattgcggacatggttactccttaaaaaaatactaataatcaccttggctatttagtaagtgtcatttaacactatactcatattaatccatggactcataatctctatacgggattaacggatgttctatatacggggatgagtagttctcttctttaactttatactttttactaatcatatttagactgatgtatgggtaatagtgtttgaagagctcgttctcatcatcagaataaatcaatatctctgtttttttgttatacagatgtattacagcctcatatattacgtaatagaacgtgtcatctaccttattaactttcaccgcatagttgtttgcaaatacggttaatcctttgacctcgtcgatttccgaccaatctgggcgtataatgaatctaaactttaatttcttgtaatcattcgaaataatttttagtttgcatccgtagttatcccctttatgtaactgtaaatttctcaacgcgatatctccattaataatgatgtcgaattcgtgctgtatacccatactgaatggatgaacgaataccgacggcgttaatagtaatttactttttcatctttacatattgggtactagttttactatcataagtttataaattccacaagctactatggaataagccaaccatcttagtataacacacatgtcttaaagtttattaattaattacatgttgttttatatatcgctacgaatttaaacagagaaatcagtttaggaaaaaaaattatctatctacatcatcacgtctctgtattctacgatagagtgctactttaagatgagacatatccgtgtcatcaaaaatatactccattaaaatgattattccggcagcgaacttgatattggatatatcacaacctttgttaatatctacgacaatagacagcagtcccatggttccataaacagtgagtttatctttctttgaagagatattttgtagagatcttataaaactgtcgaatgacatcgcatttatatctttagctaaatcgtatatgttaccatcgtaatatctaaccgcgtctatcttaaacgtttccatcgctttaaagacgtttccgatagatggtctcatttcatcagtcatactgagccaacaaatataatcgtgtataacatctttgatagaatcagactctaaagaaaacgaatcggctttattatacgcattcatgataaacttaatgaaaaatgtttttcgttgtttaagttggatgaatagtatgtcttaataattgttattatttcattaattaatatttagtaacgagtacactctataaaaacgagaatgacataactaatcataactagttatcaaagtgtctaggacgcgtaattttcatatggtatagatcctgtaagcattgtctgtattctggagctattttctctatcgcattagtgagttcagaatatgttataaatttaaatcgaataacgaacataactttagtaaagtcgtctatattaactcttttattttctagccatcgtaataccatgtttaagatagtatattctctagttactacgatctcatcgttgtctagaatatcacatactgaatctacatccaattttagaaattggtctgtgttacatatctcttctatattattgttgatgtattgtcgtagaaaactattacgtagaccattttctttataaaacgaatatatagtactccaattatctttaccgatatatttgcacacataatccattctctcaatcactacatctttaagattttcgttgttaagatatttggctaaactatataattctattagatcatcaacagaatcagtatatatttttctagatccaaagacgaactctttggcgtcctctataatattcccagaaaagatattttcgtgttttagtttatcgagatctgatctgttcatatacgccatgattgtacggtacgttatgataaccgcataaaataaaaatccattttcatttttaaccaatactattcataattgagattgatgtaatactttgttactttgaacgtaaagacagtacacggatccgtatctccaacaagcacgtagtaatcaaatttggtgttgttaaacttcgcaatatttatcaatttagatagaaacttatactcatcatctgttttaggaatccatgtattattaccactttccaacttatcattatcccaggctatgtttcgtccatcatcgttgcgcagagtgaataattcttttgtattcggtagttcaaatatataatccatgcatagatcggtaaagctattgtagatgtgatttttcctaaatctaatataaaactcgtttactagcaaacactttcctgatttatcgaccaagacacatatggtttctaaatctatcaagtggtggggatccatagttatgacgcagtaacatagattattaccttcttaactgtcgctaatatctatatatttattgttatcgtattggattctgcatatagatggcttgtatgtcaaagatatagaacacataaccaatttatagtcgcgctttacattctcgaatctaaagttaagagatttagaaaacattatatcctcggatgatgttatcactgtttctggagtaggatatattaaagtctttacagatttcgtccgattcaaataaatcactaaataatatcccacattatcatctgttagagtagtatcattaaatctattatattttatgaaagatatatcactgctcacctctatatttcgtacatttttaaactgtttgtataatatctctctgatacaatcagatatatctattgtgtcggtagacgataccgttacatttgaattaatggtgttccattttacaacttttaacaagttgaccaattcatttctaatagtatcaaacgctccatgattaaatattttaatagtatccattttatatcactacggacacaaagtagctgacataaaccattgtataatttttatgttttatgtttattagcgtacacattttggaagttccggcttccatgtatttcctggagagcaagtagatgatgaggaaccagataggttatatccgtacttgcacttaaagtttacattgtcgttgtatgagtatgatcttttaaacccgctagacaagtatccgtttgatattgtaggatgtggacatttaacaatctgacacgtgggtggatcggaccattctcctcctgaacacaggacaccagagttaccaatcaacgaatatccactattgcaactataagttacaacgcttccatcggtataaaaatcctcgtatccgttatgtcttccgttggatatagatggaggggattggcatttaacagattcacaaataggtgcctcgggattccataccatagatccagtagatcctaattcacaatacgatttagattcaccgatcaaatgatatccgctattacaagagtacgttatactagagccaaagtctactccgccaatatcaagttggccattatcgatatctcgaggcgatgggcatctccgtttaatacattgattaaagagtgtccatccagtacctgtacatttagcatatataggtcccattttttgctttctgtatccaggtagacatagatattctatagtgtctcctatgttgtaattagcattagcatcagtctccacactattcttaaatttcatattaatgggtcgtgacggaatagtacagcatgatagaacgcatcctattcccaacaatgtcaggaacgtcacgctctccaccttcatatttatttatccgtaaaaatgttatcctggacatcgtacaaataataaaaagcccatatatgttcgctattgtagaaattgtttttcacagttgctcaaaaacgatggcagtgacttatgagttacgttacactttggagtctcatctttagtaaacatatcataatattcgatattacgagttgacatatcgaacaaattccaagtatttgattttggataatattcgtattttgcatctgctataattaagatataatcaccgcaagaacacacgaacatctttcctacatggttaaagtacatgtacaattctatccatttgtcttccttaactatatatttgtatagataattacgagtctcgtgagtaattccagtaattacatagatgtcgccgtcgtactctacagcataaactatactatgatgtctaggcatgggagacttttttatccaacgatttttagtgaaacattccacatcgtttaatactacatatttttcatacgtggtataaactccacccattacatatatatcatcgtttacgaataccgacgcgcctgaatatctaggagtaattaagtttggaagtcttatccatttcgaagtgccgtgtttcaaatattctgccacacccgttgaaatagaaaattctaatcctcctattacatataactttccattgttaacacaagtactaacttctgattttaacgacgacatattagtaaccgttttccattttttcgtttcaagatctacccgcgatacggaataaacatgtctattgttaatcatgccgccaataatgtatagacaattatgtaaaacatttgcattatagaattgtctatctgtattaccgactatcgtccaatattctgttctaggagagtaatgggttattgtggatatataatcagagtttttaatgactactatattatgttttataccatttcgtgtcactggctttgtagatttggatatagttaatcccaacaatgatatagcattgcgcatagtattagtcataaacttgggatgtaaaatgttgatgatatctacatcgtttggatttttatgtatccactttaataatatcatagctgtaacatcctcatgatttacgttaacgtcttcgtgggataagatagttgtcagttcatcctttgataattttccaaattctggatcggatgtcaccgcagtaatattgttgattatttctgacatcgacgcattatatagttttttaattccatatcttttagaaaagttaaacatccttatacaatttgtggaattaatattatgaatcatagtttttacacatagatctactacaggcggaacatcaattattatggcagcaactagtatcatttctacattgtttatggtgatgtttatcttcttccagcgcatatagtctaatagcgattcaaacgcgtgatagtttataccattcaatataatcgcttcatcctttagatggtgatcctgaatgcgtttaaaaaaattatacggagatgccgtaataatttccttattcacttgtataatttccccattgatagaaaatatcacgctttccattcttgaagtactataagtaattatagtataatgtaaaggtttatatattcaatattttttataaaaaaatcatttcgacattaattcctttttaaatttccgtctatcatctatagaaacatattctatgaatttataaaatgcttttacgtgtcctatcgtaggcgatagaaccgctaaaaagcctattgaatttctacaaaagaatctattatatggtatagggagagtataaaacattaaatgcccgtacttattaaagtattcagtagccaatcctaactctttcgaatacttattaatggctcttgttctgtacgaatctatttttttgaacaacggacctagtggtatatcttgttctatgtatctaaaataatgtctgactagatccgttagtttaatatcctcagtcatcttgtctagaatggcaaatctaactgcgggtttaggctttagtttagtttttatatctacatctatgtctttatctaacaccaaaaatataatagctaatattttattacaatcatccggatattcttctacgatctcactaactaatgtttctttggttatactagtatagtcactatcggacaaataaagaaaatcagatgatcgatgaataatacatttaaattcatcatctgtaagatttttgagatgtctcattaaaatattattagggtcagtactcattatcattaggcagctattacttattttattatttttcaccatatagatcaatcattagatcatcaaaatatgtttcaatcatcctaaagagtatggtgaatgactcttcccatctaatttctgaacgttcaccaatgtctctagccactttggcactaatagcgatcattcgcttagcgtcttctatattattaactggttgattcaatctatctagcaatggaccgtcggacagcgtcattctcatgttcttaatcaatgtacatacatcgccgtcatctaccaattcatccaacaacataagctttttaaaatcatcattataataggtttgatcgttgtcatttctccaaagaatatatctaataagtagagtcctcatgcttagtaatttaactattttagttaacaactattttttatgttaaatcaattagtacaccgctatgtttaatacttattcatattttagtttttaggattgagaatcaatacaaaaattaatgcatcattaattttagaaatacttagtttccacgtagttaatgaaacatttgaactcatcgtacaagacgttctcgtacaggacgtaactataaaccggtttatatttgttcaagatagatacaaatccgataactttttttacgaattctacgggatccactttaaaagtgtcataccgggttctttttatttttttaaacagatcaatggtgtgatgttgattaggtcttttacgaatttgatatagaatagcgtttacatattctccataatggtcaatcgccatttgttcgtatgtcataaattctttaattatatgacactgtgtattgtttagttcatccttgttcattgttaggaatctatccaaaatggcaattatactagaactataggtgcgttgtatacacatattgatgtgtctgtttatacaatccatgatatttggatccatgctactaccttcgggtaaaattgtagcatcatataccatttctagtactttaggttcattattatccattgcagaggacgtcatgatcgcatcctaaaaaaatatattatttttatgttattttgttaaaaataatcatcgaatacttcgtaagatactccttcatgaacataatcagttacaaaacgtttatatgaagtaaagtatctacgatttttacaaaagtccggatgcataagtacaaagtacgcgataaacggaataataatagatttatctagtctatctttttctatagctttcatagttagatacatggtctcagaagtaggattatgtaacatcagcttcgataaaatgactgggttatttagtcttacacattcgctcatacatgtatgaccgttaactacagagtctacactaaaatgattgaacaatagatagtctaccattgtttcgtattcagatagtacagcgtagtacatggcatcttcacaaattatatcattgtctaatagatatttgacgcatcttatggatcccacttcaacagccatcttaaaatcggtaaaatcatattgctttcctttatcattaataatttctaaaacatcatctctatcataaaagatacaaatattaactgtttgatccgtaataacattgctagtcgatagcaatttgttaataagatgcgctgggctcaatgtcttaataagaagtgtaagaggactatctccgaatttgttttgtttattaacatccgttgatggaagtaaaagatctataatgtctacattcttgactgttttagagcatacaatatggagaggtgtatttccatcatgatctggttttgagggactaattcctagtttcatcatccatgagattgtagaagcttttggattgtctgacataagatgtctatgaatatgatttttgccaaatttatccactatcctggcttcgaatccgatggacattatttttttaaacactctttctgaaggatctgtacacgccaacaacggaccacatccttcttcatcaaccgagttgttaatcttggctccatactgtaccaataaatttattctctctatgacttcatcatctgttcccgagagataatatagaggcgttttatgctgtttatcacacgcgtttggatctgcgccgtgcgtcagcagcatcgcgactattctattattattaattttagaagctatatgcaatggataatttccatcatcatccgtctcatttggagagtatcctctatgaagaagttcttcgacaaatcgttcatctagtcctttaattccacaatacgcatgtagaatgtgataattatttccagaaggttcgatagcttgtagcatattcctaaatacatctaaatttttactattatatttggcataaagagatagataatactcggccgacataatgttgtccattgtagtataaaaattaatatttctatttctatttctgtatatttgcaacaatttactctctataacaaatatcataacttagttcttttatgtcaagaaggcactggtttagttcatctataaatgtcacgccataactaccacgcatgctatactcagaattatgataaagatatttatccttggggtgtaggtaatggggattaatctttgttggatcagtctctaagttaacacatgtcacacatgatccatttatagttatatcacacgatgatgatttatgaattgattccggaagatcgctatcgtattttgtggttccacaattcatttccatacatgttattgtcacactaatattatgatgaactttatctagccgctgagtggtaaacaacagaacagatagtttattatctttaccaacaccctcagccgctgccacaaatctctgatccgtatccatgatggtcatgtttatttctagtccgtatccagtcaacactatgttagcatttctgtcgatatagctttcactcatatgacactcaccaataatagtagaattaatgtcgtaatttacaccaatagtgagttcggcggcaaagtaccaataccggtaatcttgtcgaggaggacatatagtattcttgtattctaccgaatacccgagagatgcgatacaaaagagcaagactaatttgtaaaccatcttactcaaaatatgtaacaatagtacgatgcaatgagtaagacaataggaaatctatcttatatacacataattattctatcaattttaccaattagttagtgtaatgttaacaaaaatgtgggagaatctaattagtttttctttacacaattgacgtacatgagtctgagttccttgtttttgctaattatttcatccaatttattattcttgactatatcgagatcttttgtataggagtcagacttgtattcaacatgcttttctataatcattttagctatttcggcatcatccaatagtacattttccagattagcagaatagatattaatgtcgtatttgaacagagcctgtaacatctcaatgtctttattatctatagccaatttaatgtccggaatgaagagaagggaattattggtgtttgtcgacgtcatatagtcgagcaagagaatcatcatatccacgtgtccattttttatagtggtgtgaatacaactaaggagaatagccagatcaaaagtagatggtatttctgaaagaaagtatgatacaatacttacatcattaagcatgacggcatgataaaatgaagttttccatccagttttcccatagaacatcagtctccaatttttcttaacaaacagttttaccgtttgcatgttaccactatcaaccgcataatacaatgcagtgtttcccttgtcatcaaattgtgaatcatccagtccactgaatagcaaaatctttactattttggtatcttccaatgtggctgcctgatgtaatggaaattcattctctagaagatttttcaatgctccagcgttcaacaacgtacatactagacgcacgttattatcagctattgcataatacaaggcactatgtccatggacatccgccttaaatgtatctttactagagagaaagcttttcagctgcttagacttccaagtattaattcgtgacagatccatgtctgaaacgagacgctaattagtgtatattttttcattttttataattttgtcatattgcaccagaattaataatatctctaatagatctgattagtagatacatggctatcgcaaaacaacatatacacatttaataaaaataatatttattaagaaaattcagatttcacgtacccatcaatataaataaaataatgattccttacaccgtacccatattaaggagattccaccttacccataaacaatataaatccagtaatatcatgtctaatgatgaacacaaatggtgtattaaattccagtttttcaggagatgatctcgccgtagctaccataatagtagatgcctctgctacagttccttgttcgtcgacatctatctttgcattctgaaacattttataaatatataatgggtccctagtcatatgtttaaacgacgcattatctggattaaacatactaggagccatcatttcggctatcgacttaatatccctcttattttcgatagaaaatttagggagtttaagattgtacactttattccctaattgaaacgaccaatagtctaattttgcagccgtaatagaatctgtgaaatgggtcatattatcacctattgccaggtacatactaatattagcatccttatacggaaggcgtaccatgtcatattctttgtcatcgattgtgattgtatttccttgcaatttagtaactacgttcatcatgggaaccgttttcgtaccgtacttattagtaaaactagcattgcgtgttttagtgatatcaaacggatattgccatgtacctttaaaatatatagtattaatgattgcccatagagtattattgtcgagcatattagaatctactacattagacataccggatctacgttctactatagaattaattttattaaccgcatctcgtctaaagtttaatctatataggccgaatctatgatattgttgataatacgacggtttaatacacacagtattatctacgaaactttgataagttagatcagtgtacgtatatttagatgttttcagcttagctaatcctgatattaattctgtaaatgctggacccagatctctttttctcaaatccatagtcttcaataattctattctagtattacctgatgcaggcaatagcgacataaacatagaaaacgaatagccaaacggcgagaagacaatattatcatcttgaatatttttatacgctactataccggcattggtaaatccttgcagacgataggtagacgctgaacacgttaacgatagtatcaataacgcaatcatgattttatggtattaataattaaccttatttttatgttcggtataaaaaaattattgatgtctacacatccttttgtaattgacatctatatatccttttgtataatcaactctaatcactttaacttttacagttttccctaccagtttatccctatattcaacatatctatccatatgcatcttaacactctctgccaagatagcttcagagtgaggatagtcaaaaagataaatatatagagcataatccttctcgtatactctgccctttattacatcgcccgcattgggcaacgaataacaaaatgcaagcatcttgttaacgggctcgtaaattgggataaaaattatgtttttatatctattttattcaagagaatattcaggaatttctttttccggttgtatctcgtcgcagtatatatcatttgtacattgtttcatattttttaatagtttacaccttttagtaggactagtatcgtacaattcatagctgtattttgaattccaatcacgcataaaaatatcttccaattgttgacgaagacctaatccatcatccggtgtaatattaatagatgctccacatgtatccgtaaagtaatttcctgtccaatttgaggtacctatataggccgttttatcggttaccatatatttggcatggtttaccctagaatacggaatgggaggatcagcatctggtacaataaatagctttacttctatatctatgtttttagattttagcatagcgatagatcttaaaaagtttctcatgataaacgaagatcgttgccagcaactaatcaatagcttaacggatacttgtctgtctatagcggatcttcttaattcatcttctatataaggccaaaacaaaattttacccgccttcgaataaataatagggataaagttcataacagatacataaacgaatttactcgcatttctaatacatgacaataaagcggttaaatcattggttctttccatagtacatagttgttgcggcgcagaagcaataaatacagagtgtggaacaccacttacgttaatactaagaggatgatctgtattataatacgacggataaaagtttttccaattatatggtagattgttaactccaagataccagtatacctcaaaaatttgagtgagatccgctgccaagttcctattattgaagatcgcaatacccaattctttgacctgagttagtgatctccaatccatgttagcgcttcctaaataaatatgtgtattatcagatatccaaaattttgtatgaagaactcctcctaggatatttgtaatatctatgtatcgtacttcaactccggccatttgtagtctttcaacatcctttaatggtttgttagatttattgacggctactctaactcttactcctcttttgggtaattgtacaatctcgtttaatattatcgtgccgaaattcgtacccacttcatccgataaactccaataaaaagatgatatatctagtgtttttgtggtattggatagaatttccctccacatgttaaatgtagacaaatatactttatcaaattgcatacctataggaatagtctctgtaatcactgcgattgtattatccggattcattttatttgttaaaaaataatcctatatcacttcactctattaaaaatccaagtttctatttctttcatgactgattttttaacttcatccgtttccttatgaagatgatgtttggcaccttcataaatttttatttctctattacaatttgcatgttgcatgaaataatatgcacctaaaacatcgctaatctcattgtttgttccctggagtatgagagtcgggggggtgttaatcttggaaattatttttctaaccttgttggtagccttcaagacctgactagcaaatccagccttaattttttcatgattgattaatgggtcgtattggtatttataaactttatccatatctctagatactgattctggacatagctttccgactggcgcatttggtgtgatggttcccataagtttggcagctagcagattcagttttgaaacagcatctgcattaactagaggagacattagaatcattgctgtaaacaagtttggattatcgtaagaggctagtatagaaattgttgctcccatggaatgacccaataagtagatttaatagttaccacgtgctgtaccaaagtcatcaatcatcattttttcaccattacttcttccatgtccaatatgatcatgtgagaatactaaaattcctaacgatgatatgttttcagctagttcgtcataacgtccagaatgtttaccagctccatgacttatgaatactaatgccttaggatatgtaataggtttccaatatttacaatatatgtaatcattgtccagattgaacatacagtttgcactcatgattcacgttatataactatcaatattaacagttcgtttgatgatcatattatttttatgttttattgataattgtaaaaacatacaattaaatcaatatagaggaaggagacggatactgtcttttgtgagatagtcatggcgactaaatcagattatgaggatgctgttttttactttgtggatgatgataaaatatgtagtcgcgactccatcatcgatctaatagatgaatatatcacgtggagaaatcatgttatagtgtttaacaaagatattaccagttgtggaagactgtacaaggaattgatgaagttcgatgatgccgctatacagtactatggtattgataaaattaatgagattgtcgaagctatgagcgaaggagaccactacatcaattttacaaaagtccatgatcaggaaagtttattcgctaccataggaatatgtgctaaaatcactgaacattggggatacaaaaagatttcagaatctagattccaatcattgggaaacattacagatctgatgaccgacgataatataaacatcttgatactttttctagaaaaaaaattgaattgatgatataggggtcttcataacgcataattattacgttagcattctatatccgtgttaaaaaaaattatcctatcatgtatttgagagttttatatgtagcaaacatgatagctgtgatgccaataagctttagatattcacgcgtgctagtgttagggatggtattatctggtggtgaaatgtccgttatataatctacaaaacaatcatcgcatatagtatgcgatagtagagtaaacatttttatcgtttctactgggttcatacatcgtctacccaattcggttatgaatgaaattgtcgccaatcttacacccaaacccttgttatccattagcatagtattaacttcgttatttatgtcataaactgtaaatgattctgtagatgccatatcatacatgatattcatgtccctattataatcattactaactttatcacaatatatgttgataatatctatatatgatctagtctttgtgggcaactgtctatacaagtcgtctaaacgttgtttactcatatagtatcgaacagccatcattacatggtcccgttccgttgatagataatcgagtatgttagtggacttgtcaaatctatataccatattttctggaagtggatatacatagtcgtgatcaacattattgctagcctcatcttctatatcctgtactataccattatctatatcatctacataatctacgatattattatacataaacatcgacaacatactattgtcaattatctaagtcctgttgatccaaacccttgatctcctctatctgtactatctagagattgtacttcttccagttctggataatatatacgttgatagattagctgggctattctatcccccgtatttacattaaacgtacattttccattattaataagaataactcctatgtttcccctataatcttcgtctattacaccgcctcctatatcaatgccttttagggacagaccagacctaggagctattctaccatagcagaacttaggcatggacatactaatatctgtcttaattaactgtcgttctccaggagggatagtataatcgtaagcgctatataaatcatatccggcggcgtaaggtgattgcctagtaggagatttagctctgttagtttccttaacaaatctaactggtgagttaatattcatgttgaacataaaactaatattttatttcaaaattatttaccatcccatatattccatgaataagtgtgatgattgtacacttctatagtatctatatacgattcacgataaaatcctcctatcaatagcagtttattatccactatgatcaattctggattatccctcggataaataggatcatctatcagagtccatgtattgctggattcacaataaaattccgcatttctaccaaccaagaataaccttctaccgaacactaacgcgcatgatttataatgaggataataagtggatggtccaaactgccactgatcatgattgggtagcaaatattctgtagttgtatcagtttcagaatgtcctcccattacgtatataacattgtttatagatgccactgctggattacatctaggtttcagaagactcggcatattaacccaagcagcatccccgtggaaccaacgctcaacagatgtgggatttggtagacctcctactacgtataatttattgttagcgggtatcccgctagcatacagtctggggctattcatcggaggaattggaatccaattgtttgatatataatttacagctatagcattgttatgtatttcattgttcatccatccaccgatgagatatactacttctccaacatgagtacttgtacacatatggaatatatctataatttgatccatgttcataggatactctatgaatggatacttgtatgatttgcgtggttgtttatcacaatgaaatattttggtacagtctagtatccattttacattatttatacctctgggagaaagataatttgacctgattacatttttgataaggagtagcagatttcctaatttatttcttcgctttatataccacttaatgacaaaatcaactacataatcctcatctggaacatttagttcatcgctttctagaataagtttcatagatagataatcaaaattgtctatgatgtcatcttccagttccaaaaagtgtttggcaataaagtttttagtatgacataagagattggatagtccgtattctatacccatcatgtaacactcgacacaatattcctttctaaaatctcgtaagataaagtttatacaagtgtagatgataaattctacagaggttaatatagaagcacgtaataaattgacgacgttatgactatctatatatacctttccagtatatgagtaaataactatagaagttaaactgtgaatgtcaaggtctagacaaacccttgtaactggatctttatttttcgtgtatttttgacgtaaatgtgtgcgaaagtaaggagataactttttcaatatcgtagaattgactattatattgccacctatagcatcaataattgttttgaatttcttagtcatagacaatgctaatatattcttacagtacacagtattaacaaatatcggcatttatgtttctttaaaagtcaacatctagagaaaaatgattatctttttgagacataactcccattttttggtattcacccacacgtttttcgaaaaaattagtttttccttccaatgatatattttccatgaaatcaaacggattggtaacattataaatttttttaaatcccaattcagaaatcaatctatccgcgacgaattctatatatgttttcatcatttcacaattcattcctataagtttaactggaagagccgcagtaagaaattcttgttcaatggatactgcatctgttataatagatctaacggtttcttcactcggtggatacaataaatgtttaaacatcaaacatgcgaagtcgcagtgtagaccctcgtctctactaattagttcgttggaaaacgtgagtccgggcattaggccacgctttttaagccaaaatatggaagcgaatgatccggaaaagaagattccttctactgcagcaaaggcaataagtctctctccataaccggcgctgtcatgtatccacttttgagcccaatcggccttcttttttacacaaggcattgtttctatggcattaaagagatagtttttttcattactatctttaacataagtatcgatcaaaagactatacatttccgaatgaatgttttcaatggccatctgaaatccgtagaaacatctagcctcggtaatctgtacttctgtacaaaatcgttccgccaaattttcattcactattccgtcactggctgcaaaaaacgccaatacatgttttataaaatatttttcgtctggtgttagtttattccaatcattgatatctttagatatatctacttcttccactgtccaaaatgatgcctctgcctttttatacatgttccagatgtcatgatattggattgggaaaataacaaatctatttggatttggtgcaaggatgggttccataactaaattaacaatatcaataaattttttttcagttatctatatgcctgtacttggattttttgtacatcgatatcgccgcaatcactacaataattacaagtattattgatagcattgttattagtactatcataattaaattatcgacattcatgggtgctgaataatcgttattatcatcattatcattttgtaattgtgacatcatactaaataaatcgtttgcgagattgttgtgggaagcgggcatggaggatgcattatcattattatttaacgccttccatttggattcacaaatatggcgcgcgttcaacattttatggaaactataattttgtgaaaacagataacaagaaaactcgtcatcgttcaaatttttaacgatagtaaaccgattaaacgtcgagctaatttctaacgctagcgactctgttggatatgggtttccagatatatatcttttcagttcccctacgtatctataatcatctgtaggaaatggaagatatttccatttatctactgttcctaatatcatatgtggtggtgtagtagaaccattaagcgcgaaagatgttatttcgcatcgtattttaacttcgcaataatttctggttagataacgcactctaccagtcaagtcaatgatattagcctttacagatatattcatagtagtcgtaacgatgactccatcttttagatgcgatactcctttgtatgtaccagaatcttcgtacctcaaactcgatatatttaaacaagttaatgagatattaacgcgttttatgaatgatgatatataaccagaagttttatcctcggtggctagcgctataaccttatcattataataccaactagtgtgattaatatgtgacacgtcagtgtgggtacaaatatgtacattatcgtctacgtcgtattcgatacatccgcatacagccaacaaatataaaatgacaaatactctaacgccgttcgtacccatcttgatgcggtttaataaatgttttgatttcaatttattgtaaaaaaagattcggttttatactgttcgatattctcattgcttatattctcatctatcatctccacacagtcaaatccgtggttagcatgcacctcatcaaccggtaaaagactatcggactcttctatcattataactctagaatatttaatttggtcattattaatcaagtcaattatcttatttttaacaaacgtgagtattttactcattttttataaaaacttttagaaatatacagactctatcgtgtgtctatatcttctttttatatccaatgtatttatgtctgatttttcttcatttatcatatataatggtccaaattctacacgtgcttcggattcatccagatcattaaggttcttataattgtaacatccttctcttccctcttctacatcttccttcttattcttattcttagcgtcacagaatctaccacagcaggatcccatgacgagcgtcatattaaactaatccattttcaattataatatatgattagtaatgaccattaaaataaaaaatattcttcataaccggcaagaaagtgaaaagttcacattgaaactatgtcagtagtatacatcatgaaatgatgatatatatatactctattttggtggaggattatatgatataattcgtggataatcattcttaagacacatttcttcattcgtaaatcttttcacgttaaatgagtgtccatattttgcaatttcttcatatgatggcggtgtacgtggacgaggctgctcctgttcttgttgtggtcgccgactgtcgtgtttgcgtttatccctccattatcgcgattgcgtagatggagtactattatataccttgtaattaaatttttttattaattaaacgtataaaaacgttccgtatctgtatttaagagccagatttcgtctaatagaacaaatagctacagtaaaaataactagaataattgctacacccactagaaaccacggatcgtaatacggcaatcggttttcgataataggtggaacgtatattttatttaaggacttaacaattgtctgtaaaccacaatttgcttccgcggatcctgtattaactatctgtaaaagcatatgttggccgggcggagccgaacattctccgatatccaatttctgtatatctataatattattaacctccgcatacgcattacagttcttttctagcttggataccgcactaggtacatcgtctagatctattcctatttcctcagcgatagctcttctatccttttccggaagcaatgaaatcacttcaataaatgattcaaccatgagtgtgaaactaagtcgagaattactcatgcatttgttagttattcggagcgcgcaatttttaaactgtcctataacctctcctatatgaatagcacaagtgacattagtagggatagaatgttgagctaatttttgtaaataactatctataaaaagattatacaaagttttaaactctttagtttccgccatttatccagtctgagaaaatgtctctcataataaatttttccaagaaactaattgggtgaagaatggaaacctttaatctatatttatcacagtctgttttggtacacatgatgaattcttctaatgccgtactaaattcgatatctttttcgatttctggatatgtttttaataaagtatgaacaaagaaatggaaatcgtaataccagttatgtttaactttgaaattgttttttattttcttgttaatgattccagccacttgggaaaagtcaaagtcgtttaatgccgatttaatacgttcattaaaaacaaactttttatcctttagatgaattattattggttcattggaatcaaaaagtaagatattatcgggtttaagatctgcgtgtaaaaagttgtcgcagcatggtagttcgtagattttaatgtataacagagccatctgtaaaaagataaactttatgtattgtaccaaagatttaaatcctaatttgatagctaactcggtatctactttatctgccgaatacagtgctaggggaaaaattataatgtttcctctttcgtattcgtagttagttctcttttcatgttcgaaaaagtgaaacatgcggttaaaatagtttataacattaatattactgttaataactgccgggtaaaagtgggatagtaatttcacgaatttgatactgtcctttctctcgttaaacgcctttagaaaaactttagaagaatatctcaatgatagttcctgaccatccatagtttgtatcaataatagcaacatatgaagaacacgtttatacagagtatgtaaaaatgttaatttatagtttaatcccatggcccacgcacacacgattaattttttttcatctccctttagattgttgtatagaaatttgggtactgtgaactccgccgtagtttccatgggactatataattttgtggcctcgaatacaaattttactacatagttatctatcttaaaaactataccatatcctcctgtagatatgtgataaaaatcgtcgtttataggataaaatcgtttatccttttgttggaaaaaggatgaattaatgtaatcattctcttctatctttagtagtgtttccttattaaaattcttaaaataatttaacaatctaactgacggagcccaattttggtgtaaatctaattgggacattatattgttaaaatacaaacagtctcctaatataacagtatctgataatctatggggagacatccattgatattcaggggatgaatcattggcaacacccatttattgtacaaaaagccccaatttacaaacgaaagtccaggtttgatagagacaaactattaactattttgtctctgtttttaacacctccacagtttttaatttctttagtaatgaaattattcacaatatcagtatcttctttatctaccagagattttactaacttgataaccttggctgtctcattcaatagggtagtaatatttgtatgtgtgatattgatatctttttgaattgtttcttttagaagtgattctttgatggtgccagcatacgaattacaataatgcagaaactcggttaacatgcaggaattatagtaagccaattccaattgttgcctgtgttgtattagagtgtcaatatgagcaatggtgtccttgcgtttctctgatagaatgcgagcagcgattttggcgttatcatttgacgatatttctggaatgacgaatcctgtttctactaactttttggtaggacaaagtgaaacaatcaagaagatagcttctcctcctatttgtggaagaaattgaactcctctagatgatctactgacgatagtatctccttgacagatattggaccgaattacagaagtacctggaatgtaaagccctgaaaccccctcattttttaagcagattgttgccgtaaatcctgcactgtgaccaagatagagagctcctttggtgaatccatctctatgtttcagtttaaccaagaaacagtcagctggtctaaaatttccatctctatctaatacagcatctaacttgatgtcaggaactatgaccggtttaatgttatatgtaacattgagtaaatccttaagttcataatcatcactgtcatcagttatgtacgatccaaacaatgtttctactggcatagtggatacgaagatgctatccatcagaatgtttccctgattagtattttctatatagctattcttctttaaacgattttccaaatcagtaactatgttcatttttttaggagtaggacgcctagccagtatggaagaggattttctagatcctctcttcaacatctttgatctcaatggaatgcaaaaccccatagtgaaacaaccaacgataaaaataatattgtttttcactttttataattttaccatctgactcatggattcattaatatctttataagagctactaacgtataattctttataactgaactgagatatatacaccggatctatggtttccataattgagtaaatgaatgctcggcaataactaatggcaaatgtataaaacaacgaaattatactagagttgttaaagttaatattttctatgagctgttccaataaattatttgttgtgactgcgttcaagtcataaatcatcttgatactatccagtaaacagtctttaagttctggaatattatcatcccattgtaaagcccctaattcgactatcgaatatcctgctctgatagcagtttcaatatcgacggacgtcaatactgtaataaaggtggtagtattgtcatcatcgtgataaactacgggaatatggtcgttagtaggtacggtgactttacacaacgcgatatataactttccttttgtaccatttttaacgtagttgggacgtcctgcagggtattgttttgaagaaatgatatcgagaacagatttgatacgatatttgttggattcctgattattcactataatataatctagacagatagatgattcgataaatagagaaggtatatcgttggtaggataatacatccccattccagtattctcggatactctattgatgacactagttaagaacatgtcttctattctagaaaacgaaaacatcctacatggactcattaaaacttctaacgctcctgattgtgtctcgaatgcctcgtacaaggatttcaaggatgccatagattctttgaccaacgatttagaattgcgtttagcatctgatttttttattaaatcgaatggtcggctctctggtttgctaccccaatgataacaatagtcttgtaaagataaaccgcaagaaaatttatacgcatccatccaaataaccctagcaccatcggatgatattaatgtattattatagattttccatccacaattattgggccagtatactgttagcaacggtatatcgaatagattactcatgtaacctactagaatgatagttcgtgtactagtcataatatctttaatccaatctaagaaatttaaaattagattttttacactgttaaagttaacaaaggtattacccggatacgtggatatcatatatggcattggtccattatcagtaatagctccataaactgatacggcgatggtttttatatgtgtttgatctaacgaggaagaaattcgcgcccacaattcatctctagatatgtatttaatatcaaacggtaacacatcaatttcgggacgcgtatatgtttctaaatttttaatccaaatataatgatgacctatatgccctattatcatactgtcaactatagtacacctagagaacttacgatacatctgtttcctataatcgttaaattttacaaatctataacatgctaaaccttttgacgacaaccattcattaatttctgatatggaatctgtattctcgataccgtattgttctaaagccagtgctatatctccctgttcgtgggaacgctttcgtataatatcgatcaacggataatctgaagtttttggagaataatatgactcatgatctatttcgtccataaacaatctagacataggaattggaggcgatgatcttaattttgtgcaatgagtcgtcaatcctataacttctaatattgtaatattcatcatcgacataacactatctatgttatcatcgtatattagtataccacggccttcttcatttcgtgccaaaataatatacagtcttaaataattacgcaatatctcaatagtttcataattgttagctgttttcatcaaggtttgtatcctgtttaacatgatggcgttctataacgtctctattttctatttttaattttttaaatttttaacgatttactgtggctagatacccaatctctctcaaatatttttttagcctcgcttacaagctgtttatctatactattaaaactgacgaatccgtgattttggtaatgggttccgtcgaaatttgccgaagtgatatgaacatattcgtcgtcgactatcaacaattttgtattattctgaatagtgaaaaccttcacagatagatcattttgaacacacaacgcgtctagacttctggcggttgccatagaatatacgtcgttcttatcccaattaccaactagaagtctgatcttaactcctctattaatggctgcttctataatggagttgtaaatgtcaggccaatagtagctattaccgtcgacacgtgtagtgggaactatggccaaatgttcaatatctatactagtcttagccgacttgagtttatcaataactacatcagtgtctagatctctagaatatcccaataggtgttctggagaatcagtaaagaacactccacctataggattcttaatatgatacgcagtgctaactggcagacaacaagccgcagagcataaattcaaccatgaattttttgcgctattaaaggctttaaaagtatcaaatcttctacgaagatctgtggccagcgggggataatcagaatatacacctaacgttttaatcgtatgtatagatcctccagtaaatgacgcgtttcctacataacatctttcatcatctgacacccaaaaacaaccgagtagtagtcccacattattttttttatctatattaacggttataaaatttatatccgggcagtgactttgtagctctcccagatttcttttccctcgttcatctagcaaaactattattttaatccctttttcagatgcctcttttagtttatcaaaaataagcgcgcccctagtcgtactcagaggattacaacaaaaagatgctatgtatatatatttcttagctagagtgataatttcgttaaaacattcaaatgttgttaaatgatcggatctaaaatccatattttctggtagtgtttctaccagcctacattttgctcccgcaggtaccggtgcaaatggccacatttagttaacataaaaacttatacatcctgttctatcaacgattctagaatatcatcggctatatcgctaaaattttcatcaaagtcgacatcacaacctaactcagtcaatatattaagaagttccatgatgtcatcttcgtttatttctatatccgtatccattgtagattgttgaccgattatcgagtttaaatcattactaatactcaatccttcagaatacaatctgtgtttcattgtaaatttataggcggtgtatttaagttggtagattttcaattatgtatcaaagaagtgtctgctttatggccttataagctccctcaagctcaacagctgctcccaagaaatcggcttcctttttatagaagttattgtacctggatcgagagttaatttccctgtcgttaaccatatccccgatagtcttgactatgcatttcaaggcaatgagatcgttttcttcgacgaattccttcgctttatttacaaattttttagaagcctcaacaaactttgaatctacaaacttactactgattacgtcaaatgactctatgtacgcaagagccacggacttgcggagcttctcgtaggaatcggcaacatgtcgagcattagacacatcgttatcgacggcctggtccagttctatagcaaagtcatcgatcagtttgctcaggaacattggtttgtactcttcgatgatcttttccaattctttgaacttattgactatcttgttatcctttttaagaatggatatggcttggtttactttagatttatcggagctggtgccctcgctgtatgtcattatataggtcattatatcgttgtacgccccggtatattcactgtagatagcgtccaatttaatagagtaatatttggctttttccacgaaaattttaagttcatcaatatttctttgattaagtctagacacatcgcaagaaccacctccccctgatcctccgccaccggaccctcctccaccatatagcaacagtagttcttgctcctccttgattctagcatcctcttcattattttcttctacgtacataagcatgtccaatacgttagacaacacaccgacgatggcggccgccacagacacgaatatgactagaccgatgaccatttaaaaacccctctctagctttcacttaaactgtatcgattattcttttagaacatgtataatataaaaacattattctatttcgaatttaggcttccaaaaatttttcatccgtaaaccgataataatatatatagacttgttaatagtcggaataaatagattaatgcttaaactatcatcatctccacgattagagatacaatatttacattctttttgctgtttcgaaactttatcaatacacgttaatacaaacccaggaaggagatattgaaactgaggctgttgaaaatgaaacggtgaatacaataattcagataatgtaaaatcatgattccgtattctgatgatattagaactgctaatggatgtcgatggtatgtatctaggagtatctattttaacaaagcatcgatttgctaatatacaattatcattttgattaattgttattttattcatattcttaaaaggtttcatatttatcaattcttctacattaaaaatttccatttttaatttatgtagccccgcaatactcctcattacgtttcattttttgtctataatatccattttgttcatctcggtacatagattatccaattgagaagcgcatttagtagttttgtacattttaagtttattgacgaatcgtcgaaaactagttatagttaacattttattatttgataccctgatattaatacccctgccgttactattatttataactgatgtaacccacgtaacattagaattaattatcgatagtaatgcatcgacgcttccaaaattgtctattataaactcaccgataatttttttattgcatgttttcatattcattaggattatcaaatctttaatcttattacgattgtatgcgttgatattacaagacgtcattctaaaagacggaggatctccatcaaatgccagacaatcacgtacaaagtacatggaaataggttttgttctattgcgcatcatagattcatatagaacacccatagaaatactaatttgttttactctataaaatactaatgcatctatttcatcgttttgtataacgtctttccaagtgccaaattccaaatttttttcattgatagtaccaaattcttctatctctttaactacttgcatagataggtaattacagtgatgcctacatgccgttttttgaaactgaatagatgcgtctagaagcgatgctacactagtcacaatcaccactttcatatttagaatatatgtatgtaaaaatatagtagaatttcattttgtttttttctatgctataaatgaattctcattttgcatctgctcatactccgttttatatcaataccaaagaaggaagatatctggttctaaaagccgttaaagtatgcgatgttagaactgtagaatgcgaaggaagtaaagcttcctgcgtactcaaagtagataaaccctcatcgcccgcgtgtgagagaagaccttcgtccccgtccagatgcgagagaatgaataaccctggaaaacaagtcccgtttatgaggacggacatgctacaaaatatgttcgcggctaatcgcgataatgtagcttctagacttttgtcctaaaatactattatatccttttcgatattaataaatccgtgtcgtccaggttttttatctctttcagtatgtgaatagataggtattttatctctattcatcatcgaatttaagagatccgataaacattgtttgtattctccagatgtcagcatctgatacaacaatatatgtgcacataaacctctggcacttatttcatgtaccttccccttatcactaaggagaatagtatttgagaaatatgtatacatgatattatcatgaattagatatacagaatttgtaacactctcgaaatcacacgatgtgtcggcgttaagatctaatatatcactcgataacacattttcatctagatacactagacattttttaaagctaaaatagtctttagtagtgacagtaactatgcgattattttcatcgatgatacatttcatcggcatattattacgcttaccatcaaagactataccatgtgtatatctaacgtattctagcatggttgccatacgtgcattaaacttttcaggatctttggatagatcttccaatctatctatttgagaaaacatttttatcatgttcaatagttgaaacgtcggatccactatatagatattatctataaagattttaggaactacgttcatggtatcctggcgaatattaaaactatcaatgatatgattatcgttttcatcttttatcaccatatagtttctaagatatgggattttacttaatataatattatttcccgtgataaattttattagaaaggccaaatctataagaaaagtcctagaattagtctgaagaatatctatatcgccgtaccgtatatttggattaattagatatagagaatatgatccgtaacatatacaacttttattatggcgtctaagatattcttccatcaacttattaacatttttgactagggaagatacattatgacgtcccattacttttgccttgtctattactgcgacgttcatagaatttagcatatctcttgccaattcttccattgatgttacattataagaaattttagatgaaattacatttggagctttaatagtaagaactcctaatatgtccgtgtatgtggtcactaatacagattgtagttctataatcgtaaataatttacctatattatatgtttgagtctgtttagaaaagtagctaagtatacgatcttttatttctgatgcagatgtatcaacatcggaaaaaaatctttttttattcttttttactaaagatacaaatatgtctttgttaaaaacagttattttctgaatatttctagcttgtaattttaacatatgatattcgttcacactaggtactctgcctaaataggtttctataatctttaatgtaatattaggaagagtattctgatcaggattcctattcattttgaggatttaaaactctgattattgtctaatatggtctcaacacaaactttttcacagagcgatagagtttttgataactcgtttttcttaagaaatataaaactactgtttccagagctcgctctatcttttattttatctaattcgatacaaactcctgatactggttcagaaagtaattcattaattttcagtcctttatagaagatatttaatatagataatacaaaattttcagttcttgatatcgatctgattgatcctagaactagatatattaataacgtgctcattaggcagtttatggcagcttgataattagatatagtatattccagttcatatttattagataccgcattgcccagattttgatattctatgaattcctctgaaaataaatccaaaataactagacattctattttttgtggattagtgtactctcttccctctatcatgttcactactggtgtccacgatgataaatatctagagggaatataatatagtccataggatgccaatctagcaatgtcgaataactgtaatttgattcttcgttcttcattatgaattgattcttgaggtataaacctaacacaaattatattattagacttttcgtatgtaatgtctttcatgttataagtttttaatcctggaatagaatctattttaatgaggcttttaaacgcagagttctccaacgagtcaaagcataatactctgttgtttttcttatatacgatgttacgattttcttctttgaatggaataggtttttgaattagtttataattacaacataatagataaggaagtgtgcaaatagtacgcggaaaaaacataatagctcccctgttttcatccatggttttaagtaaatgatcactggcttctttagtcaatggatattcgaacattaaccgtttcatcatcattggacagaatccatatttcttaatgtaaagagtgatcaaatcattgtgtttattgtaccatcttgttgtaaatgtgtattcggttatcggatctgctcctttttctattaaagtatcgatgtcgatctcgtctaagaattcaactatatcgacatatttcatttgtatacacataaccattactaacgtagaatgtataggaagagatgtaacgggaacagggtttgttgattcgcaaactattctaatacataattcttctgttaatacgtcttgcacgtaatctattatagatgccaagatatctatataattattttgtaagatgatgttaactatgtgatctatataagtagtgtaataattcatgtatttcgatatatgttccaactctgtctttgtgatgtctagtttcgtaatatctatagcatcctcaaaaaatatattcgcatatattcccaagtcttcagttctatcttctaaaaaatcttcaacgtatggaatataataatctattttacctcttctgatatcattaatgatatagtttttgacactatcttctgtcaattgattcttattcactatatctaagaaacggatagcgtccctaggacgaactactgccattaatatctctattatagcttctggacataattcatctattataccagaattaatgggaactattccgtatctatctaacatagttttaagaaagtcagaatctaagacctgatgttcatatattggttcatacatgaaatgatctctattgatgatagtgactatttcattctctgaaaattggtaactcattctatatatgctttccttgttgatgaaggatagaatatactcaatagaatttgtaccaacaaactgttctcttatgaatcgtatatcatcatctgaaataatcatgtaaggcatacatttaacaattagagacttgtctcctgttatcaatatactattcttgtgataatttatgtgtgaggcaaatttgtccacgttctttaattttgttatagtagatatcaaatccaatggagctacagttcttggcttaaacagatatagtttttctggaacgaattctacaacattattataaaggactttgggtagataagtgggatgaaatcctattttaattaatgcgatagccttgtcctcgtgcagatatccaaacgcttttgtgatagtatggcattcattgtctagaaacgctctacgaatatctgtgacagatatcatctttagagaatatactagtcgcgttaatagtactacaatttgtattttttaatctatctcaataaaaaaattaatatgtatgattcaatgtataactaaactactaactgttattgataactagaatcagaatctaatgatgacgtaaccaagaagtttatctactgccaatttagctgcattatttttagcatctcgtttagattttccatctgccttatcgaatactcttccgtcgatgtctacacaggcataaaatgtaggagagttactaggccccactgattcaatacgaaaagaccaatctctcctagtaatttggcagtactcattaataacggtgacagggttagcacctttccaatcaataatttttttagccggaataacatcatcaaaagacttatgatcctctctcattgatttttcgcgggatacatcatctattatggcgtcagccataacatcagcatccggcttatccgcctccgttgtcataaaccaacgaggaggaatatcgtcggagctgtacaccatagcactacgttgaagatcgtacagagctttattaacttctcgcttctccatattaagttgtctagttagttgtgcagcagtagctccttcgattccaatggttttaatagcctcacacacaatctctgcgttagaacgttcgtcgatatagattttagacatttttagagagaactaacacaaccagcaataaaactgaacctactttatcatttttttattcatcatcctctggtggttcgtcgttcctatcgaatgtggatctgattaacccgtcatctataggtgatgctggttctggagattctggaggagatggattattatctggaagaatctctgttatttccttgttttcatgtatcgattgcgttgtaacattaagattgcgaaatgctctaaatttgggaggcttaaagtgttgtttgcaatctctacacgcatgtctaactagtggaggttcgtcagcggctctagtttgaatcatcatcggcgtagtattcctacttttacagttaggacacggtgtattgtatttctcgtcgagaacgttaaaataatcgttgtaactcacatcctttattttatctatattgtattctactcctttcttaatgcattttataccgaataagagatagcgaaggaattctttttcggtgccgctagtacccttaatcatatcacatagtgttttatattccaaatttgtggcaatagacggtttatttctatacgatagtttgtttctggaatcctttgagtattctataccaatattattctttgattcgaatttagtttcttcgatattagattttgtattacctatattcttgatgtagtactttgatgatttttccatggcccattctattaagtcttccaagttggcatcatccacatattgtgatagtaattctcggatatcagtagcggctaccgccattgatgtttgttcattggatgagtaactactaatgtatacattttccatttataacacttatgtattaactttgttcatttatattttttcattattatgttgatattaacaaaagtgaatatatatgttaataattgtattgtggttatacggctacaatttcataatgagtggaagtcagtgtccgatgatcaatgacgatagctttactctgaaaagaaagtatcaaatcgatagtgcggagtcaacaataaaaatggataagaagaggataaagtttcagaatagagccaaaatggtaaaagaaataaatcagacaataagagcagcacaaactcattacgagacattgaaactaggatacataaaatttaagagaatgattaggactactactctagaagatatagcaccatctattccaaataatcagaaaacttataaactattctcggacatttcagccatcggcaaagcatcacagaatccgagtaagatggtatatgctctgctgctttacatgtttcccaatttgtttggagatgaccatagattcattcgttatagaatgcatccaatgagtaaaatcaaacacaagatcttctctcctttcaaacttaatcttattagaatattagtggaagaaagattctataataatgaatgcagatctaataaatggagaataattggaacacaagttgataaaatgttgatagctgaatctgataaatatacaatagatgcaaggtataacctaaaacccatgtatagaatcaagggaaaatctgaagaagataccctcttcatcaaacagatggtagaacaatgtgtgacatcccaggaattggtggaaaaagtgttgaagatactgtttagagatttgttcaagagtggagaatacaaagcatacagatacgatgatgatgtagaaaatggatttattggattggatacactaaaattaaacattgttcatgatatagttgaaccatgtatgcctgttcgtaggccagtggctaagatactgtgtaaagaaatggtaaataaatactttgagaatccgctacatattattggtaaaaatcttcaagagtgcattgactttgttagtgaataggcatttcatctttctccaatactaattcaaattgttaaattaataatggatagtataaatagttattagtgataaaatagtaaaaataattattagaataagagtgtagtatcatagataactctcttctataaaaatggattttattcgtagaaagtatcttatatacacagtagaaaataatatagattttttaaaggatgatacattaagtaaagtaaacaattttaccctcaatcatgtactagctctcaagtatctagttagcaattttcctcaacacgttattactaaggatgtattagctaataccaatttttttgttttcatacatatggtacgatgttgtaaagtgtacgaagcggttttacgacacgcatttgatgcacccacgttgtacgttaaagcattgactaagaattatttatcgtttagtaacgcaatacaatcgtacaaggaaaccgtgcataaactaacacaagatgaaaaatttttagaggttgccgaatacatggacgaattaggagaacttataggcgtaaattatgacttagttcttaatccattatttcacggaggggaacccatcaaagatatggaaatcatttttttaaaactgtttaagaaaacagacttcaaagttgttaaaaaattaagtgttataagattacttatttgggcatacctaagcaagaaagatacaggcatagagtttgcggataatgatagacaagatatatatactctatttcaacaaactggtagaatcgtccatagcaatctaacagaaacgtttagagattatatctttcccggagataagactagctattgggtgtggttaaacgaaagtatagctaatgatgcggatatcgttcttaatagacacgccattaccatgtatgataaaattcttagttatatatactctgagataaaacaaggacgcgttaataaaaacatgcttaagttagtttatatctttgagcctgaaaaagatatcagagaacttctgctagaaatcatatatgatattcctggagatatcctatctattattgatgcaaaaaacgacgattggaaaaaatattttattagtttttataaagctaattttattaacggtaatacatttattagtgatagaacgtttaacgaggacttattcagagttgttgttcaaatagatcccgaatatttcgataatgaacgaattatgtctttattctctacgagtgctgcggacattaaacgatttgatgagttagatattaataacagttatatatctaatataatttatgaggtgaacgatatcacattagatacaatggatgatatgaagaagtgtcaaatctttaacgaggatacgtcgtattatgttaaggaatacaatacatacctgtttttgcacgagtcggatcccatggtcatagagaacggaatactaaagaaactgtcatctataaaatccaagagtagacggctgaacttgtttagcaaaaacattttaaaatattatttagacggacaattggctcgtctaggtcttgtgttagatgattataaaggagacttgttagttaaaatgataaaccatcttaagtctgtggaggatgtatccgcattcgttcgattttctacagataaaaaccctagtattcttccatcgctaatcaaaactattttagctagttataatatttccatcatcgtcttatttcaaaggtttttgagagataatctatatcatgtagaagaattcttggataaaagcatccatctaaccaagacggataagaaatatatacttcaattgataagacacggtagatcatagaacagaccaaatatattattaataatttgtatatacatagatataattatcacatattaaaaattcacacatttttgataaatgggaactgctgcaacaattcagactcccaccaaattaatgaataaagaaaatgcagaaatgattttggaaaaaattgttgatcatatagttatgtatattagtgacgaatcaagtgattcagaaaataatcctgaatatattgattttcgtaacagatacgaagactatagatctctcattataaaaagtgatcacgagtttgtaaagctatgtaaaaatcatgcagagaaaagttctccagaaacgcaacaaatgattatcaaacacatatacgaacaatatcttattccagtatctgaagtactattaaaacctataatgtccatgggtgacataattacatataacggatgtaaagacaatgaatggatgctagaacaactctctaccctaaactttaacaatctccgcacatggaactcatgtagcataggcaatgtaacgcgtctgttttatacattttttagttatctgatgaaagataaactaaatatataagtataatcccattctaatactttaacctgatgtattacctgcatcttattagaatattaacctaactaaaagacataacataaaaactcattacatagttgataaaaagcggtaggatataaatattatggctgccaccgttccgcgttttgacgacgtgtacaaaaatgcacaaagaagaattctagatcaagaaacattttttagtagaggtctaagtagaccgttaatgaaaaacacatatctatttgataattacgcgtatggatggataccagaaactgcaatttggagtagtagatacgcaaacttagatgcaagtgactattatcccatttcgttgggattacttaaaaagttcgagtttctcatgtctctatataaaggtcctattccagtatacgaagaaaaagtaaatactgaattcatagccaatggatcgttctctggtagatacgtatcatatcttcgaaagttttctgctcttccaacaaacgagtttattagttttttgttactgacttccattccaatctataatatcttgttctggtttaaaaatactcagtttgatattactaaacacacattattcagatacgtctatacagataatgccaaacacctggcgttggctaggtatatgcatcaaacaggagactataagcctttgtttagtcgtctcaaagagaattatatatttaccggtcccgttccaataggtatcaaagatatagatcaccctaatcttagtagagcaagaagtccatccgattatgagacattagctaatattagtactatattgtactttaccaagtatgatccggtattaatgtttttattgttttacgtacctgggtattcaattactacaaaaattactccagccgtagaatatctaatggataaactgaatctaacaaagagcgacgtacaactgttgtaaattattttatgcttcgtaaaatgtaggttttgaaccaaacattctttcaaagaatgagatgcataaaactttattatccaatagattgactatttcggacgtcaatcgtttaaagtaaacttcgtaaaatattctttgatcactgccgagtttaaaacttctatcgataattgtctcatatgttttaatatttacaagttttttggtccatggtacattagccggacaaatatatgcaaaataatatcgttctccaagttctatagtttctggattatttttattatattcagtaaccaaatacatattagggttatctgcggatttataatttgagtgatgcattcgactcaacataaataattctagaggagacgatctactatcaaattcggatcgtaaatctgtttctaaagaacggagaatatctatacatacctgattagaattcatccgtccttcagacaacatctcagacagtctggttttgtacatcttaatcatattcttatgaaacttggaaacatctcttctagtttcactagtacctttattaattctctcaggtacagattttgaattcgacgatgccgagtatttcatcgttgtatatttcttcttcgattgcataatcagattcttatataccgcctcaaactctattttaaaattattaaacaatactctactattaatcagtcgttctaactctttcgctatttctatagacttatctacatcttgactgtctatctctgtaaacacggagtcggtatctccatacacgctacgaaaacgaaatctgtaatctataggcaacgatgttttcacaatcggattaatatctctatcgtccatataaaatggattacttaatggattggcaaaccgtaacataccgttagataactctgctccatttagtaccgattctagatacaagatcattctacgtcctatggatgtgcaactcttagccgaagcgtatgagtatagagcactatttctaaatcccatcagaccatatactgagttggctactatcttgtacgtatattgcatggaatcataaatggccttttcagttgaactggtagcctgttttaacatctttttatatctggctctctctgccaaaaatgttcttaatagtctaggaatggttccttctatcgatctatcgaaaattgctatttcagagatgaggttcggtagtctaggttcacaatgaaccgtaatatatctaggaggtggatatttctgaagcaatagctgattatttatttcttcttccaatctattggtactaacaacgacaccgactaatgtttccggagatagatttccaaagatacacacattaggatacagactgttataatcaaagattaatacattattactaaacattttttgttttggagcaaataccttaccgccttcataaggaaacttttgttttgtttctgatctaactaagatagttttagtttccaacaatagctttaacagtggacccttgatgactgtactcgctctatattcgaataccatggattgaggaagcacatatgttgacgcacccgcgtctgtttttgtttctactccataatactcccacaaatactgacacaaacaagcatcatgaatacagtatctagccatatctaaagctatgtttagattataatccttatacatctgagctaaatcaacgtcatcctttccgaaagataatttatatgtatcattaggtaaagtaggacataatagtacgactttaaatccattttcccaaatatctttacgaattactttacatataatatcctcatcaacagtcacataattacctgtggttaaaacctttgcaaatgcagcggctttgcctttcgcgtccgtagtatcgtcaccgatgaacgtcatttctctaactcctctatttaatactttacccatgcaactgaacgcgttcttggatatagaatccaatttgtacgaatccaatttttcagatttttgaatgaatgaatatagatcgaaaaatatagttccattattgttattaacgtgaaacgtagtattggccatgccgcctactcccttatgactagactgatttctctcataaatacagagatgtacagcttcctttttgtccggagatctaaagataatcttctctcctgttaataactctagacgattagtaatatatctcagatcaaagttatgtccgttaaaggtaacgacgtagtcgaacgttagttccaacaattgtttagctattcgtaacaaaactatttcagaacatagaactagttctcgttcgtaatccatttccattagtgactgtatcctcaaacatcctctatcgacggcttcttgtatttcctgttccgttaacatctcttcattaatgagcgtaaacaataatcgtttaccacttaaatcgatataacagtaacttgtatgcgagattgggttaataaatacagaaggaaacttcttatcgaagtgacactctatatctagaaataagtacgatcttgggatatcgaatctaggtatttttttagcgaaacagttacgtggatcgtcacaatgataacatccattgttaatctttgtcaaatattgctcgtccaacgagtaacatccgtctggagatatcccgttagaaatataaaaccaactaatattgagaaattcatccatggtggcattttgtatgctgcgtttctttggctcttctatcaaccacatatctgcgacggagcattttctatctttaatatctagattataacttattgtctcgtcaatgtctatagttctcatctttcccaacggcctcgcattaaatggaggaggagacaatgactgatatatttcgtccgtcactacgtaataaaagtaatgaggaaatcgtataaatacggtctcaccatttcgacatctggatttcagatataaaaatctgttttcaccgtgactttcaaaccaattaatgcaccgaacatccatttatagaatttagaaatatattttcatttaaatgaatcccaaacattggggaagagccgtatggaccattatttttatagtactttcgcaagcgggtttagacggcaacatagaagcgtgtaaacgaaaactatatactatagtcagcactcttccatgtcctgcatgtagacggcacgcgactatcgctatagaggacaataatgtcatgtctagcgatgatctgaattatatttattattttttcatcagattatttaacaatttggcatctgatcccaaatacgcgatcgatgtgacaaaggttaaccctttataaacttaacccattataaaacttatgattagtcacaactgaaataaccgcgtgattattttttggtataattctacacggcatggtttctgtaactatgaattcaacccccgttacattagtgaaatctttaacaaacagcaagggttcgtcaaagacataaaactcattgtttacaatcgaaatagaccccctatcacacttaaaataaaaaatatccttatcctttaccaccaaataaaattctgattggtcaatgtgaatgtattcacttaacagttccacaaatttatttattaactccgaggcacatacatcgtcggtattttttatggcaaactttactcttccagcatccgtttctaaaaaaatattaacgagttccatttatatcatccaatattattgaaatgacgttgatggacagatgatacaaataagaaggtacggtacctttgtccaccatctcctccaattcatgctctattttgtcattaactttaatgtatgaaaacagtacgccacatgcttccatgacagtgtgtaacactttggatacaaaatgtttgacattagtataattgttcaagactgtcaatctataatagatagtagctataatatattctatgatggtattgaagaagatgacaaccttggcatattgatcatttaacacagacatggtatcaacagatagcttgaatgaaagagaatcagtaattggaataagcgtcttctcgatagagtgtccgtataccaacatgtctgatattttgatgtattccattaaattatttagttttttctttttattttcgttaaacagcatttctgtcaacggaccccaacatcgttgaccgattaagttttgattgatttttccgtgtaatgcgtatctagtcagatcgtatagcctatccaataatccatcatctgtgcgtagatcacatcgtacactttttaattctctatagaagagcgacagacatctggagcaattacagacagcaatttctttattctctacagatgtaagatacttgaagacattcctatgatgatgcagaattttggataacacggtattgatggtatctgttaccataattcctttgatggctgatagtgtcagagcacaagatttccaatctttgacaatttttagcaccattatctttgttttgatatctatatcagacagcatggtgcgtctgacaacacagggattaagacggaaagatgaaatgattctctcaacatcttcaatggataccttgctattttttctggcattatctatatgtgcgagaatatcctctagagaatcagtatcctttttgatgatagtggatctcaatgacatgggacgtctaaaccttcttattttatcaccagattgcatggtgatttgtcttctttcttttatcataatgtaatctctaaattcatcggcaaattgtctatatctaaaatcataatatgagatgtttacctctacaaatatctgttcgtccaatgttagagtatctacatcagttttgtattccaaattaaacatggcaacggatttaattttatattcctctattaagtcctcgtcgataataacagaatgtagataatcatttaatccatcgtacatggttggaagatgcttgttgacaaaatctttaattgtcttgatgaaggtgggactatatctaacatcttgattaataaaatttataacattgtccataggatactttgtaactagttttatacacatctcttcatcggtaagtttagacagaatatcgtgaacaggtggtatattatattcatcagatatacgaagaacaatgtccaaatctatattgtttaatatattatatagatgtagcgtagctcctacaggaatatctttaactaagtcaatgatttcatcaaccgttagatctattttaaagttaatcatataggcattgatttttaaaaggtatgtagccttgactacattctcattaattaaccattccaagtcactgtgtgtaagaagattatattctatcataagcttgactacatttggtcccgataccattaaagaattcttatgatataaggaaacagcttttaggtactcatctactctacaagaattttggagagccttaacgatatcagtgacgtttattatttcaggaggaaaaaacctaacattgagaatgtcggagttaatagcttccagatacagtgattttggcaatagtccgtgtaatccataatccagtaacacgagctggtgcttgctagacaccttttcaatgtttaatttttttgaaataagctttgataaagccttcctcgcaaattccggatacatgaacatgtcggcgacatgattaagtattgttttttcattatttttatattttctcaacaagttctcaataccccaatagatgatagaatatcacccaatgcgtccatgttgtctatttccaacaggtcgctatatccaccaatagaagtttttccaaaaaagattctaggaacagttctaccaccagtaatttgttcaaaatagtcacgcaattcattttcgggtttaaattctttaatatcgacaatttcatacgctcctcttttgaaactaaacttatttagaatatccagtgcatttctacaaaaaggacatgtatacttgacaaaaattgtcactttgttattggccaacctttgttgtacaaattcctcggccattttaatatttaagtgatataaaactatctcgacttatttaactctttagtcgagatatatggacgcagatagctatatgatagccaactacagaaggcaaacgctataaaaaacataattacgacgagcatatttataaatatttttattcagcattacttgatatagtaatattaggcacagtcaaacattcaaccactctcgatacattaactctctcattttctttaacaaattctgcaatatcttcgtaaaaagattcttgaaactttttagaatatctatcgactctagatgaaatagcgttcgtcaacatactatgttttgtatacataaaggcgcccattttaacagtttctagtgacaaaatgctagcgatcctaggatcctttagaatcacatagattgacgattcgtctctcttagtaactctagtaaaataatcatacaatctagtacgcgaaataatattatccttgacttgaggagatctaaacaatctagttttgagaacatcgataagttcatcgggaatgacatacatactatctttaatagaactcttttcatccagttgaatggattcgtccttaaccaactgattaatgagatcttctattttatcattttccagatgatatgtatgtccattaaagttaaattgtgtagcgcttctttttagtctagcagccaatactttaacatcactaatatcgatatacaaaggagatgatttatctatggtattaagaattcgtttttcgacatctgtcaaaaccaattcctttttgcctgtatcatccagttttccatcctttgtaaagaaattattttctactagactattaataagactgataaggattcctccataattgcacaatccaaactttttaacaaaactagactttacaagatctacaggaatgcgtacttcaggtttcttagcttgtgattttttcttttgtggacattttcttgtgaccaactcatctaccatttcattgattttagcagtgaaataagctttcaatgcacgggcactgatactattgaaaacgagttgatcttcaaattccgccatttaagttcaccaaacaacttttaaatacaaatatatcaatagtagtagaataagaactataaaaaaaataataattaaccaataccaaccccaacaaccggtattattagttgatgtgactgttttctcatcacttagaacagatttaacaatttctataaagtctgtcaaatcatcttccggagaccccataaatacaccaaatatagcggcgtacaacttatccatttatacattgaatattggcttttctttatcgctatcttcatcatattcatcatcaatatcaacaagtcccagattacgagccagatcttcttctacattttcagtcattgatacacgttcactatctccagagagtccgataacgttagccaccacttctctatcaatgattagtttcttgagtgcgaatgtaatttttgtttccgttccggatctatagaaaactacaggtgtgataattgccttggccaattgtctttctcttttactgagtgattctagttcaccttctatagatctgagaatggatgattctccagtcgaaacatattctaccatggatccgtttaatttgttgatgaagatggattcatccttaaatgttttctctgtaatagtttccaccgaaagactatgcaaagaatttggaatgcgttccttgtgcttaatgtttccatagacggcttctagaagttgatacaacataggactagccgcggtaacttttatttttagaaagtatccatcgcttctatcttgtttagatttatttttataaagtttagtctctccttccaacataataaaagtggaagtcatttgactagataaactatcagtaagttttatagagatagacgaacaattagcgtattgagaagcatttagtgtaacgtattcgatacattttgcattagatttactaatcgattttgcatactctataacacccgcacaagtctgtagagaatcgctagatgcagtaggtcttggtgaagtttcaactctcttcttgattaccttactcatgattaaacctaaataattgtactttgtaatataatgatatatattttcactttatctcatttgagaataaaaatgtttttgtttaaccactgcatgatgtacagatttcggaatcgcaaaccaccagtggttttattttatccttgtccaatgtgaattgaatgggagcggatgcgggtttcgtacgtagatagtacattcccgtttttagaccgagactccatccgtaaaaatgcatactcgttagtttggaataactcggatctgctatatggatattcatagattgactttgatcgatgaaggctcccctgtctgcagccatttttatgatcgtcttttgtggaatttcccaaatagttttataaactcgcttaatatcttctggaaggtttgtattctgaatggatccaccatctgccataatcctattcttgatctcatcattccataattttctctcggttaaaactctaaggagatgcggattaactacttgaaattctccagacaatactctccgagtgtaaatattactggtatacggttccaccgactcattatttcccaaaatttgagcagttgatgcagtcggcataggtgccaccaataaactatttctaagaccgtatgttctgattttatcttttagaggttcccaattccaaagatccgacggtacaacattccaaagatcatattgtagaataccgttactggcgtacgatcctacatatgtatcgtatggtccttccttctcagctagttcacaactcgcctctaatgcaccgtaataaatggtttcgaagatcttcttatttagatcttgtgcttccaggctatcaaatggataatttaagagaataaacgcgtccgctaatccttgaacaccaataccgataggtctatgtctcttattagagatttcagcttctggaataggataataattaatatctataattttattgagatttctgacaattactttgaccacatccttcagtttgagaaaatcaaatcgcccatctattacaaacatgttcaaggcaacagatgccagattacaaacggctacctcattagcatccgcatattgtattatctcagtgcaaagattactacacttgatagttcctaaattttgttgattactctttttgttacacgcatccttataaagaatgaatggagtaccagtttcaatctgagattctataatcgctttccagacgactcgagcctttattatagatttgtatctcctttctctttcgtatagtgtatacaatcgttcgaactcgtctccccaaacattgtccaatccaggacattcatccggacacatcaacgaccactctccgtcatccttcactcgtttcataaagagatcaggaatccaaagagctataaatagatctctggttctatgttcctcgtttcctgtattctttttaagatcgaggaacgccataatatcagaatgccacggttccaagtatatggccataactccaggccgtttgtttcctccctgatctatgtatctagcggtgttattataaactctcaacattggaataataccgtttgatataccattggtaccggagatatagcttccactggcacgaatattactaattgatagacctattccccctgccattttagagattaatgcgcatcgttttaacgtgtcatagataccctctatgctatcatcgatcatgttaagtagaaaacagctagacatttggtgacgactagttcccgcattaaataaggtaggagaagcgtgcgtaaaccatttttcagaaagtagattgtacgtctcaatagctgagtctatatcccattgatgaattcctactgcgacacgcattaacatgtgctgaggtctttcaacgatcttgttgtttattttcaacaagtaggatttttccaaagttttaaaaccaaaatagttgtatgaaaagtctcgttcgtaaataataaccgagttgagtttatccttatatttgttaactatatccatggtgatacttgaaataatcggagaatgtttcccatttttaggattaacatagttgaataaatcctccatcacttcactaaatagtttttttgtttccttgtgtagatttgatacggctattctggcggctagaatggcataatccggatgttgtgtagtacaagtggctgctatttcggctgccagagtgtccaattctaccgttgttactccattatatattccttgaataaccttcatagctattttaataggatctatatgatccgtgtttaagccataacataattttctaatacgagacgtgattttatcaaacatgacattttccttgtatccatttcgtttaatgacaaacatttttgttggtgtaataaaaaaattatttaacttttcattaatagggatttgacgtatgtagcgtacaaaattatcgttcctggtatatagataaagagtcctatatatttgaaaatcgttacggctcgattaaactttaatgattgcatagtgaatatatcattaggatttaactccttgactatcagggcggcaccagaaattaccatcaaaagcattaatacagttatgccgatcgcagttagaacggttatagcatccaccatttatatctaaaaattagatcaaagaatatgtgacaaagtcctagttgtatactgagaattgacgaaacaatgtttcttacatatttttttcttattagtaactgacttaatagtaggaactggaaagctagacttgattattctataagtatagatacccttccaaataatattctctttgataaaagttccagaaaatgtagaattttttaaaaagttatcttttgctattaccaagattgtgtttagacgcttattattaatatgagtgatgaaatccacaccgcctctagatatcgcttttatttccacattagatggtaaatccaatagtgaaactatctttttaggaatgtatggactcgcgtttagaggagtgaacgtcttaggcgtcggaaaggatgattcatcaaacgaataaacaatttcacaaatggatgttaatgtattagtaggaaattttttgacgctagtggaattgaagattctaatggatgatgttctacctatttcatccgataacatgttaatttccgacaccaacggttttaatatttcgatgatatacggtagtctctctttcggacttatatagcttattccacaatacgagtcattatatactccaaaaaacaaaataactagtataaaatctgtatcgaatgggaaaaacgaaattatcgacataggtatagaatctggaacattgaacgtattaatacttaattctttttctgtggtaagtaccgataggttattgacattgtatggttttaaatattctataacttgagacttgatagatattagtgatgaattgaaaattatttttatcaccacgtgtgtttcaggatcatcgtcgacgcccgtcaaccaaccgaatggagtaaaataaatatcattaatatatgctctagatattagtatttttatcaatcctttgattatcatcttctcgtaggcgaatgattccatgatcaagagtgatttaagaacatcctccggagtattaatgggcttagtaaacagtccatcgttgcaataataaaagttatccaagttaaaggatattatgcattcgtttaaagatatcacctcatctgacggagacaattttttggtaggttttagagactttgaagctacttgtttaacaaagttattcatcgtcgtttactattctatttaattttgtagttaatttatcacatatcacattaattgactttttggtccatttttccatacgtttatattcttttaatcctgcgttatccgtttccgttatatccagggatagatcttgcaagttaaatagaatgctcttaaataatgtcatttttttatccgctaaaaatttaaagaatgtataaacttttttcaaagatttaaaacttttaggtggagttctagtacacaatatcataaacaaactaataaacatcccgcattcagattccaacagctgattaacttccacattaatacagcctattttcgctccaaatgtacattcgaaaaatctgaataaaacatcgatgtcacaatttgtattatccaatacagaatgtctgtgattcgtgttaaaaccatcggagaaggaatagaaataaaaattattatagtggtggaattcagttggaatattgcctccggagtcataaaaggatactaaacattgttttttatcataaattacacatttccaatgagacaaataacaaaatccaaacattacaaatctagaggtagaacttttaattttgtctttaagtatatacgataagatatgtttattcataaacgcgtcaaatttttcatgaatcgctaaggagtttaagaatctcatgtcaaattgtcctatataatccacttcggatccataagcaaactgagagactaagttcttaatacttcgattgctcatccaggctcctctctcaggctctattttcatcttgacgacctttggattttcaccagtatgtattcctttacgtgataaatcatcgattttcaaatccatttgtgagaagtctatcgccttagatactttttcccgtagtcgaggtttaaagaaatacgctaacggtatactagtaggtaactcaaagacatcatatatagaatggtaacgcgtctttaactcgtcggttaactctttcttttgatcgagttcgtcgctactattgggtctgctcaggtgccccgactctactagttccaacatcataccgataggaatacaagacactttgccagcggttgtagatttatcatatttctccactacatatccgttacaatttgttaaaaatttagatacatctatattgctacataatccagctagtgaatatatatgacataataaattggtaaatcctagttctggtattttactaattactaaatctgtatatctttccatttatcatggaaaagaatttaccagatatcttcttttttccaaactgcgttaatgtattctcttacaaatattcacaagatgaattcagtaatatgagtaaaacggaacgtgatagtttctcattggcggtgtttccagttataaaacatagatggcataacgcacacgttgtaaaacataaaggaatatacaaagttagtacagaagcacgtggaaaaaaagtatctcctccatcactaggaaaacccgcacacataaacctaaccgcgaagcaatatatatacagtgaacacacaataagctttgaatgttatagttttctaaaatgtataacaaatacagaaatcaattcgttcgatgagtatatattaagaggactattagaagctggtaatagtttacagatattttccaattccgtaggtaaacgaacagatactataggtgtactagggaataagtatccatttagcaaaattccattggcctcattaactcctaaagcacaacgagagatattttcagcgtggatttctcatagacctgtagttttaactggaggaactggagtgggtaagacgtcacaggtacccaagttattgctttggtttaattatttatttggtggattctctactctagataaaatcactgactttcacgaaagaccagtcattctatctcttcctaggatagctttagttagattgcatagcaataccattttaaaatcattgggatttaaggtactagatggatctcctatttctttacggtacggatctataccggaagaattaataaacaaacaaccaaaaaaatatggaattgtattttctacccataagttatctctaacaaaactatttagttatggcactcttattatagacgaagttcatgagcatgatcaaataggagatattattatagcagtagcgagaaagcatcatacgaaaatagattctatgtttttaatgactgccacgttagaggatgacagggaacggctaaaagtatttttacctaatcccgcatttatacatattcctggagatacactgtttaaaattagcgaggtatttattcataataagataaatccatcttccagaatggcatacatagaagaagaaaagagaaatttagttactgctatacagatgtatactcctcctgatggatcatccggtatagtctttgtggcatccgttgcacagtgtcacgaatataaatcatatttagaaaaaagattaccgtatgatatgtatattattcatggtaaggtcttagatatagacgaaatattagaaaaagtgtattcatcacctaatgtatcgataattatttctactccttatttggaatccagcgttactatacacaatgttacacacatttatgatatgggtagagtttttgtccccgctccttttggaggatcgcaacaatttatttctaaatctatgagagatcaacgaaaaggaagagtaggaagagttaatcctggtacatacgtctatttctatgatctgtcttatatgaagtctatacagcgaatagattcagaatttctacataattatatattgtacgctaataagtttaatctaacactccccgaagatttgtttataatccctacaaatttggatattctatggcgtacaaaggaatatatagactcgttcgatattagtacagaaacatggaataaattattatccaattattatatgaagatgatagagtatgctaaactttatgtactaagtcctattctcgctgaggagttggataactttgagaggacgggagaattaactagtattgtacgagaagccattttatctctaaatttacgaattaagattttaaattttaaacataaagatgatgatacgtatatacacttttgtaaaatattattcggtgtctataacggaacaaacgctactatatattatcatagacctctaacgggatatatgaatatgatttcagatactatatttgttcctgtagataataactaaaaatcaaactctaatgaccacatctttttttagagatgaaaaattttctacatctccttttgtagacacgactaaacattttgcagaaaaaagtttattagtgtttagataatcgtatacttcatcagtgtagatagtaaatgtgaacagataaaaggtattcttgctcaatagattggtaaattccatagaatatattaatcctttcttcttgagatcccacatcatttcaaccagagacgttttatccaatgatttacctcgtactataccacatacaaaactagattttgcagtgacgtcgtacctggtattcctaccaaacaaaattttacttttagttcttttagaaaattctaaggtagaatctctatttgccaatatgtcatctatggaattaccactagcaaaaaatgatagaaatatatattgatacatcgcagctggttttgatctactatactttaaaaacgaatcagattccataattgcctgtatatcatcagctgaaaaactatgttttacacgtattccttcggcatttctttttaatgatatatcttgtttagacaatgataaagttatcatgtccatgagagacgcgtctccgtatcgtataaatatttcattagatgttagacgcttcattaggggtatacttctataaggtttcttaatcagtccatcattggttgcgtcaagaactactatcggatgttgttgggtatctctagtgttacacatggccttactaaagtttgggtaaataactatgatatctctattaattatagatgcatatatttcattcgtcaaggatattagtatcgacttgctatcgtcattaatacgtgtaatgtaatcatataaatcatgcgatagccaaggaaaatttaaatagatgttcatcatataatcgtcgctataattcatattaatacgttgacattgactaatttgtaatatagcctcgccacgaagaaagctctcgtattcagtttcatcgataaaggataccgttaaatataactggttgccgatagtctcatagtctattaagtggtaagtttcgtacaaatacagaatccctaaaatattatctaatgttggattaatctttaccataactgtataaaatggagacggagtcataactattttaccgtttgtacttactggaatagatgaaggaataatctccggacatgctggtaaagacccaaatgtctgtttgaagaaatccaatgttccaggtcctaatctcttaacaaaaattacgatattcgatcccgatatcctttgcattctatttaccagcatatcacgaactatattaagattatctatcatgtctattctcccaccgttatataaatcgcctccgctaagaaacgttagtatatccatacaatggaatacttcatttctaaaatagtattcgttttctaattctttaatgtgaaatcgtatactagaaagggaaaaattatctttgagttttccgttagaaaagaaccacgaaactaatgttctgattgcgtccgattccgttgctgaattaatggatttacaccaaaaactcatataacttctagatgtagaagcattcgctaaaaaattagtagaatcaaaggatataagtagatgttccaacaagtgagcaattcccaagatttcatctatatcattctcgaatccgaaattagaaattcccaagtagatatcctttttcatccgatcgttgatgaaaatacgaactttattcggtaagacaatcatttactaaggagtaaaataggaagtaatgttcgtatgtcgttatcatcgtataaattaaaggtgtgttttttaccattaagtgacattataattttaccaatattggaattataatataggtgtatttgcgcactcgcgacggttgatgcatcggtaaatatagctgtatctaatgttctagtcggtatttcatcatttcgctgtctaataatagcgttttctctatctgtttccattacagctgcctgaagtttattggtcggataatatgtaaaataataagaaatacatacgaataacaaaaataaaataagatataataaagatgccatttagagatctaattttgttcaacttgtccaaattcctacttacagaagatgaggaatcgttggagatagtgtcttccttatgtagaggatttgaaatatcttatgatgacttgataacttactttccagataggaaataccataaatatatttataaagtatttgaacatgtagatttatcggaggaattaagtatggaattccatgatacaactttgcgagatttagtttatcttagattgtacaagtattccaagtgtatacggccgtgttataaattaggagataatctaaaaggcatagttgttataaaggacaggaatatttatattagggaagcaaatgatgacttgatagaatatctcctcaaggaatacactcctcagatttatacatattctaatgagcgcgtccccataactggttcaaaattaattctttgtggattttctcaagttacatttatggcgtatacaacgtcgcatataacaacaaataaaaaggtagatgttctcgtttccaaaaaatgtatagatgaactagtcgatccaataaattatcaaatacttcaaaatttatttgataaaggaagcggaacaataaacaaaatactcaggaagatattttattcggtaaccggtggccaaactccataggtagctttttctatttcggattttagaatttccaaattcaccagcgatttatcggttttggtgaaatccaaggatttattaatgtccacaaatgccatttgttttgtctgtggattgtatttgaaaatggaaacgatgtagttagatagatgcgctgcgaagtttcctattagggttccgcgcttcacgtcacccagcatacttgaatcaccatcctttaaaaaaaatgataagatatcaacatggagtatatcatactcggattttaattcttctactgcatcactgacattttcacaaatactacaatacggtttaccgaaaataatcagtacgttcttcatttatgggtatcaaaaacttaaaatcgttactgctggaaaataaatcactgacgatattagatgataatttatacaaagtatacaatggaatatttgtggatacaatgagtatttatatagccgtcgccaattgtgtcagaaacttagaagagttaactacggtattcataaaatacgtaaacggatgggtaaaaaagggagggcatgtaaccctttttatcgatagaggaagtataaaaattaaacaagacgttagagacaagagacgtaaatattctaaattaaccaaggacagaaaaatgctagaattagaaaagtgtacatccgaaatacaaaatgttaccggatttatggaagaagaaataaaggcaaaaatgcaattaaaaatcgataaacttacatttcaaatatatttatctgattctgataacataaaaatatcattgaatgagatactaacacatttcaacaataatgagaatgttacattattttattgtgatgaacgagacgcagaattcgttatgtgtctcgaggctaaaacacatttctctaccacaggagaatggccgttgataataagtaccgatcaggatactatgctatttgcatctactgataatcatcctaagatgataaaaaacttaactcaactgtttaaatttgttccctcggcagaggataactatttagcaaaattaacggcgttagtgaatggatgtgatttctttcctggactctatggggcatctataacacccaccaacttaaacaaaatacaattgtttagtgattttacaatcgataatatagtcactagtttggcaattaaaaattattatagaaagactaactctaccgtagacgtgcgtaatattgttacgtttataaacgattacgctaatttagacgatgtctactcgtatgttcctccttgtcaatgcactgttcaagaatttatattttccgcattagatgaaaaatggaatgaatttaaatcatcttatttagagaccgttccgttaccctgtcaattaatgtacgcgttagaaccacgtaaggagattgatgtttcagaagttaaaactttatcatcttatatagatttcgaaaatactaaatcagatatcgatgttataaaatctatatcctcgatttttggatattctaacgaaaactgtaacacgatagtattcggcatctataaggataatttactactgagtataaataattcattttactttaacgatagtctgttaataaccaatactaaaagtgataatataataaatataggttactagattaaaaatggtgttccaactcgtgtgctctacatgcggtaaagatatttctcacgaacgatataaattgattatacgaaaaaaatcattaaaggatgtactcgtcagtgtaaagaacgaatgttgtaggttaaaattatctacacaaatagaacctcaacgtaacttaacagtgcaacctctattggatataaactaatatggatccggttaattttatcaagacatatgcgcctagaggttctattatttttattaattataccatgtcattaacaagtcatttgaatccatcgatagaaaaacatgtgggtatttattatggtacgttattatcggaacacttggtagttgaatctacctatagaaaaggagttcgaatagtcccattggatagtttttttgaaggatatcttagtgcaaaagtatacatgttagagaatattcaagttatgaaaatagcagctgatacgtcattaactttattgggtattccgtatggatttggtcatgatagaatgtattgttttaaattggtagctgactgttataaaaatgccggtgttgaaacatcgtctaaacgaatattaggtaaagatatttttctgagccaaaacttcacagacgataatagatggataaagatatatgattctaataatttaacattttggcaaattgattaccttaaagggtgagttaatatgcataactactcctccgttgttttttccctcgttctttttcttaacgttgtttgccatcactctcataatgtaaagatattctaaaatggtaaacttttgcatatcggacgcagaaattggtataaatgttgtaattgtattatttcccgtcaatggactagtcacagctccatcagttttatatcctttagagtatttctcactcgtgtctaacattctagagcattccatgatctgtttatcgttgatattggccggaaagatagattttttattttttattatattactattggcaattgtagatataacttctggtaaatatttttctaccttttcaatctcttctattttcaagccggctatatattctgctatattgttgctagtatcaataccttttcttgctaagaagtcatatgtggtattcactatatcagttttaactggtagttccattagcctttccacttctgcagaataatcagaaattggttctttaccagaaaatccagctactataataggctcaccgatgatcattggcaaaatcctatattgtaccagattaatgagagcatatttcatttccaataattctgctagttcttgagacattgatttatttgatgaatctagttggttctctagatactctaccatttctgccgcatacaataacttgttagataaaatcagggttatcaaagtgtttagcgtggctagaatagtgggcttgcatgtattaaagaatgcggtagtatgagtaaaccgttttaacgaattatatagtctccagaaatctgtggcgttacatacatgagccgaatgacatcgaagattgtccaatatttttaatagctgctctttgtccattatttctatatttgactcgcaacaattgtagataccattaatcactgattcctttttcgatgccggacaatagcacaattgtttagctttggactctatgtattcagaattaatagatatatctcttaatacagattgcactatacattttgaaactatgtcaaaaattgtagaacgacgctgttctgcagccatttaactttaaataatttacaaaaatttaaaatgagcatccgtataaaaatcgataaactgcgccaaattgtggcatatttttcagagttcagtgaagaagtgtctataaatgtagactcgacggatgagttaatgtatatttttgccgccttgggcggatctgtaaacatttgggccattatacctctcagtgcatcagtgttctaccgcggagccgaaaatattgtgtttaatcttccggtgtccaaggtaaaatcgtgtttgtgtagttttcacaatgatgccatcatagatatagaacctgatctggaaaataatctagtaaaactttctagttatcatgtagtaagtgtcgattgtaacaaggaactgatgcctattaggacagatactactatttgtctaagtatagatcaaaagaaatcttacgtgtttaattttcacaagtatgaagaaaaatgttgtggtagaaccgtcattcatttagaatggttgttgggctttatcaagtgtattagtcagcatcagcatttggctattatgtttaaagatgacaatattattatgaagactcctggtaatactgatgcgttttccagggaatattctatgactgaatgttctcaagaactacaaaagttttctttcaaaatagctatctcgtctctcaacaaactacgaggattcaaaaagagagtcaatgtttttgaaactagaatcgtaatggataatgacgataacattctaggaatgttgttttcggatagagttcaatcctttaagatcaacatctttatggcgtttttagattaatactttcaatgagataaatatgggtggcggagtaagtgttgagctccctaaacgggatccgcctccgggagtacccactgatgagatgttattaaacgtggataaaatgcatgacgtgatagctcccgctaagcttttagaatatgtgcatataggaccactagcaaaagataaagaggataaagtaaagaaaagatatccagagtttagattagtcaacacaggacccggtggtctttcggcattgttaagacaatcgtataatggaaccgcacccaattgctgtcgcacttttaatcgtactcattattggaagaaggatggaaagatatcagataagtatgaagagggtgcagtattagaatcgtgttggccagacgttcacgacactggaaaatgcgatgttgatttattcgactggtgtcagggggatacgttcgatagaaacatatgccatcagtggatcggttcagcctttaataggagtgatagaactgtagagggtcaacaatcgttaataaatctgtataataagatgcaaacattatgtagtaaagatgctagtgtaccaatatgtgaatcatttttgcatcatttacgcgcacacaatacagaagatagcaaagagatgatcgattatattctaagacaacagtctgcggactttaaacagaaatatatgagatgtagttatcccactagagataagttagaagagtcattaaaatatgcggaacctcgagaatgttgggatccagagtgttcgaatgccaatgttaatttcttactaacacgtaattataataatttaggactttgcaatattgtacgatgtaatactagcgtgaacaacttacagatggataaaacttcctcattaagattgtcatgtggattaagcaatagtgatagattttctactgttcccgtcaatagagcaaaagtagttcaacataatattaaacattcgttcgacctaaaattgcatttgatcagtttattatctctcttggtaatatggatactaattgtagctatttaaatgggtgccgcggcaagcatacagacgacggtgaatacactcagcgaacgtatctcgtctaaattagaacaagaagcgaacgctagtgctcaaacaaaatgtgatatagaaatcggaaatttttatatccgacaaaaccatggatgtaacctcactgttaaaaatatgtgctctgcggacgcggatgctcagttggatgctgtgttatcagccgctacagaaacatatagtggattaacaccggaacaaaaagcatacgtgccagctatgtttactgctgcgttaaacattcagacaagtgtaaacactgttgttagagattttgaaaattatgtgaaacagacttgtaattctagcgcggtcgtcgataacaaattaaagatacaaaacgtaatcatagatgaatgttacggagccccaggatctccaacaaatttggaatttattaatacaggatctagcaaaggaaattgtgccattaaagcgttgatgcaattgacgactaaggccactactcaaatagcacctagacaagttgctggtacaggagttcagttttatatgattgttatcggtgttataatattggcagcgttgtttatgtactatgccaagcgtatgctgttcacatccaccaatgataaaatcaaacttattttagccaataaggaaaacgtccattggactacttacatggacacattctttagaacttctccgatggttattgctaccacggatatacaaaactgaaaatatattgataatattttaatagattaacatggaagttatcgctgatcgtctagacgatatagtgaaacaaaatatagcggatgaaaaatttgtagattttgttatacacggtctagagcatcaatgtcctgctatacttcgaccattaattaggttgtttattgatatactattatttgttatagtaatttatatttttacggtacgtctagtaagtagaaattatcaaatgttgttggtggcgctagtcatcacattaactattttttattactttatactataatagtactagactgacttctaacaaacatctcacctgccataaataaatgcttgatattaaagtcttctatttctaacactattccatctgtggaaaataatactctgacattatcgctaattgacacatcggtgagtgatatgcctataaagtaataatcttctttgggcacatataccagtgtaccaggttctaacaacctatttactggtgctcctgtagcatactttttctttaccttgagaatatccatcgtttgcttggtcaatagcgatatgtgattttttatcaaccactcgaaaaagtaattggagtgttcatatcctctacgggctattgtctcatggccgtgtatgaaatttaagtaacacgactgtggtagatttgttctatagagccggttgccgcaaatagatagaactaccaatatgtctgtacaaatgttaaacattaattgattaacagaaaaaacaatgttcgttctgggaatagaaaccagatcaaaacaaaattcgttagaatatatgccacgtttatacattgaatataaaataactacagtttgaaaaataacagtatcatttaaacatttaacttgcggggttaatctcacaactttactgtttttaaactgttcaaaatatagcatcgatccatgagaaatacgtttagccgcctttaatagaggaaatcccaccgcctttctggatctcaccaacgacgatagttctgaccagcaactcatttcttcatcatccacctgttttaacatataataggcaggagatagatatccgtcattgcaatattccttctcgtaggcacacaatctaatattgataaaatctccattctcttctctgcatttattatcttgtttcggtggctgattaggctgtagtcttggtttaggctttggtatatcgttgttgaatctattttggtcattaaatctttcatttcttcctggtatatttttatcacctcgtttggttggatttttgtctatattatcgtttgtaacatcggtacgggtattcatttatcacaaaaaaaacttctctaaatgagtctactgctagaaaacctcatcgaagaagataccatattttttgcaggaagtatatctgagtatgatgatttacaaatggttattgccggcgcaaaatccaaatttccaagatctatgctttctatttttaatatagtacctagaacgatgtcaaaatatgagttggagttgattcataacgaaaatatcacaggagcaatgtttaccacaatgtataatataagaaacaatttgggtctaggagatgataaactaactattgaagccattgaaaactatttcttggatcctaacaatgaagttatgcctcttattattaataatacggatatgactgccgtcattcctaaaaaaagtggtaggagaaagaataagaacatggttattttccgtcaaggatcatcacctatcttgtgtattttcgaaactcgtaaaaagattaatatttataaagaaaatatggaatccgcatcgactgagtatacacctatcggagacaacaaggctttgatatctaaatatgcgggaattaatatcctaaatgtgtattctccttccacatccataagattgaatgccatttacggattcaccaataaaaataaactagagaaacttagtactaataaggaactagaatcgtatagttctagccctcttcaagaacccattaggttaaatgattttctgggactattggaatgtgttaaaaagaatattcctctaacagatattccgacaaaggattgattactataaatggagaatgttcctaatgtatactttaatcctgtgtttatagagcccacgtttaaacattctttattaagtgtttataaacacagattaatagttttatttgaagtattcgttgtattcattctaatatatgtattttttagatctgaattaaatatgttcttcatgcctaaacgaaaaatacccgatcctattgatagattacgacgtgctaatctagcgtgtgaagacgataaattaatgatctatggattaccatggatgacaactcaaacatctgcgttatcaataaatagtaaaccgatagtgtataaagattgtgcaaagcttttgcgatcaataaatggatcacaaccagtatctcttaacgatgttcttcgcagatgatgattcattttttaagtatttggctagtcaagatgatgaatcttcattatctgatatattgcaaatcactcaatatctagactttctgttattattattgatccaatcaaaaaataaattagaagccgtgggtcattgttatgaatctctttcagaggaatacagacaattgacaaaattcacagactttcaagattttaaaaaactgtttaacaaggtccctattgttacagatggaagggtcaaacttaataaaggatatttgttcgactttgtgattagtttgatgcgattcaaaaaagaatcctctctagctaccaccgcaatagatcctattagatacatagatcctcgtcgcgatatcgcattttctaacgtgatggatatattaaagtcgaataaagtgaacaataattaattctttattgtcatcatgaacggcggacatattcagttgataatcggccccatgttttcaggtaaaagtacagaattaattagacgagttggtaccatttttattaggcgtcacgttaccaataaaaaacaaaaaaataaattaactaattagcgatgatataatataatcatgttcatcatgagggaatctatctatcgcgtgatgattgtaatcctgtacttgagtcttatttcaagttttttggtaatatgcagcatggaacacggatatttccaggagggcattagtagatttaagatttgcccgtatcactggtacaaacaacacatgagcttgctcttcagaaggtactaccataaactggatagcattatatgagcttgactaatttttatcaataatacaaaaaaatgaaataaaaccgtctattatacgctggttaccgctattagctctaaccattttcaggatgcggtccctcgttatcgttcttctctttcctagtatcatctatagcatggtcataaggcggtgtgaaaagatggaagaagagacgtggaagcttaaaataggtatgtgtatccaggctaaggacttctacagtaagagaacagattgttcagtgcataggcccgacgtaggcggcgggttgattaccgagggaaacggttacagggtagtcgtacacgatcaatgcgaagagcctaatccgttcatcatagccacaaccaagcaaactcacttcggcgttacgcattcctatatcgaattctcaaacagcaacacgggtgctccagaaaacattccagactgttccaagcacatccttatctctgtttattgtgaccaagaagcgtcaggtctggactttcacaccctgaagtatgtggaatcaaattatctccatataactgtaaagtatgacacaagctgcataaaccatttgggagtcaactatagttttatgaacgaatgcgagaggaagctcacctccatttatgaaaccgacacccttacttgcggtgcgaaagacattcaaaccagggataagtatctcaagacgtgtaccaacaccaaattcgaccgatcagtctataaaacccacatgcagaagtccaagatccttcacgtcaagaccgaactctaaccactatcactaatcatcaagcaatttttataacttcagcgatattgccgacattaaatcatctgaattaatttcttgtattcttcagtagtatacgtatttatttattgtcggatatataaatcatacaacaatgcacctccagtattatgcgatttcattggtctcactggtaagtcttatcgactgtcataaactggcgtttaattttaatctcgaaatcaacggatccgacacccactcaaccgtcgacgtatatcttgatgattcacagattattacgtttgatggcaaagacattagaccgactattccgtttatgattggcgatgagatatttttgcctttctacaagaatgtgttcagcgaattcttctctttgtttaggcgcgtccctacgagtaccccgtatgaggatctgacgtacttttatgagtgcgattacacagataataaaagcacattcgaccaattttacctctacaatggagaggaatacaccgtaaagactcaggaagcgactaacaagaacatgtggttgactacttccgaattccggctgaaaaaatggtttgatggtgaggactgcataatgcacctgcggagtttggtaaggaaaatggaagacagcaaacgcaatacagggtagttataaatattttcataatcagagctcggaggtaatgatatgtatcaatcggtgtgtagaaagtgttacatcgactcataatattatattttttatctaaaaaactaaaaataaacattgattaaattttaatataatacttaaaaatggatgttgtgtcgttagataaaccgtttatgtattttgaggaaattgataatgagttagattacgaaccagaaagtgcaaatgaggtcgcaaaaaaactaccgtatcaaggacagttaaaactattactaggagaattattttttcttagtaagttacagcgacacggtatattagatggtgccaccgtagtgtatataggatcggctcctggtacacatatacgttatttgagagatcatttctataatttaggagtgatcatcaaatggatgctaattgacggccgccatcatgatcctattttaaatggattgcgtgatgtgactctagtgactcggttcgttgatgaggaatatctacgatccatcaaaaaacaactgcatccttctaagattattttaatttctgatgtaagatccaaacgaggaggaaatgaacctagtacggcggatttactaagtaattacgctctacaaaatgtcatgattagtattttaaaccccgtggcatctagtcttaaatggagatgcccgtttccagatcaatggatcaaggacttttatatcccacacggtaataaaatgttacaaccttttgctccttcatattcagctgaaatgagattattaagtatttataccggtgagaacatgagactgactcgagttaccaaattagacgctgtaaattatgaaaaaaagatgtactaccttaataagatcgtccgtaacaaagtagttgttaactttgattatcctaatcaggaatatgactattttcacatgtactttatgctgaggaccgtgtactgcaataaaacatttcctactactaaagcaaaggtactatttctacaacaatctatatttcgtttcttaaatattccaacaacatcaactgaaaaagttagtcatgaaccaatacaacgtaaaatatctagcaaaaattctatgtctaaaaacagaaatagcaagagatccgtacgcggtaataaatagaaacgtgctactgagatatactaccgatatagagtataatgatttagttactttaataaccgttagacataaaattgattctatgaaaactgtgtttcaggtatttaacgaatcatccataaattatactccggttgatgatgattatggagaaccaatcattataacatcgtatcttcaaaaaggtcataacaagtttcctgtaaattttctatacatagatgtggtaatatctgacttatttcctagctttgttagactagatactacagaaactaatatagttaatagtgtactacaaacaggcgatggtaaaaagactcttcgtcttcccaaaatgttagagacggaaatagttgtcaagattctctatcgccctaatataccattaaaaattgttagatttttccgcaataacatggtaactggagtagagatagccgatagatctgttatttcagtcgctgattaatcaattagtagagatgagataagaacattataataatcaataatattatcttatatctcgtttagaaaaatgctaatattaaaatagctaacgctagtaatccaatcggaagccatttgatatctataatagggtatctaatttcctgattcagatagcggacagctatattctcggtagctactcgtttggaatcacaaacattatttacatctaatttactatctgtaatggaaacgtttcccaatgaaatggtacaatccgatacattgcattttgttatatttttttttaaagaggctggtaacaacgcatcgcttcgtttacatggctcgtaccaacaataatagggtaatcttgtatctattcctatccgtactatgcttttatcaggataaatacatttacatcgtatatcgtctttgttagcatcacagaatgcataaatttgttcgtccgtcatgataaaaatttaaagtgtaaatataactattatttttatagttgtaataaaaagggaaatttgattgtatactttcggttctttaaaagaaactgacttgataaaaatggctgtaatctctaaggttacgtatagtctatatgatcaaaaagagattaatgctacagatattatcattagtcatgttaaaaatgacgacgatatcggtaccgttaaagatggtagactaggtgctatggatggggcattatgtaaaacttgtgggaaaacggaattggaatgtttcggtcactggggtaaagtaagtatttataaaactcatatagttaagcctgaatttatttcagaaattattcgtttactgaatcatatatgtattcactgcggattattgcgttcacgagaaccgtattccgacgatattaacctaaaagagttatcgggacacgctcttaggagattaaaggataaaatattatccaagaaaaagtcatgttggaacagcgaatgtatgcaaccgtatcaaaaaattactttttcaaagaaaaaggtttgtttcgtcaacaagttggatgatattaacgttcctaattctctcatctatcaaaagttaatttctattcatgaaaagttttggccattattagaaattcatcaatatccagctaacttattttatacagactactttcccatccctccgctgattattagaccggctattagtttttggatagatagtatacccaaagagaccaatgaattaacttacttattaggtatgatcgttaagaattgtaacttgaatgctgatgaacaggttatccagaaggcggtaatagaatacgatgatattaaaattatttctaataacactaccagtatcaatttatcatatattacatccggcaaaaataatatgattagaagttatatcgtcgcccgacgaaaagatcagaccgctagatctgtaattggtcccagtacatctatcaccgttaatgaggtaggaatgcccgcatatattagaaatacacttacagaaaagatatttgttaatgcctttacagtggataaagttaaacaactattagcgtcaaaccaagttaaattttactttaataaacgattaaaccaattaacaagaatacgccaaggaaagtttatcaaaaataaaatacatttattgcctggtgattgggtagaagtagctgttcaagaatatacaagtattatttttggaagacagccgtctctacatagatacaacgtcatcgcttcatctatcagagctaccgaaggagatactatcaaaatatctcccggaattgccaactctcaaaatgctgatttcgacggagatgaagaatggatgatattggagcaaaatcctaaagccgtaattgaacaaagtattcttatgtatccgacgacgttactcaaacacgatattcatggagcccccgtttatggatctattcaagatgaaatcgtagcagcgtattcattgtttaggatacaagatctttgtttagatgaagtattgaacatcttggggaaatatggaagagagttcgatcctaaaggtaaatgtaaattcagcggtaaagatatctatacttacttgataggtgaaaagattaattatccgggtctcttaaaggatggtgaaattattgcaaacgacgtagatagtaattttgttgtggctatgaggcatctgtcattggctggactcttatccgatcataagtcgaacgtggaaggtatcaactttattatcaagtcatcttatgtttttaagagatatctatctatttacggttttggggtgacattcaaagatctgagaccaaattcgacgttcactaataaattggaggccatcaacgtagaaaaaatagaacttatcaaagaagcatacgccaaatatctcaacgatgtaagagacgggaaaatagttccattatctaaagctttagaggcggactatgtggaatccatgttatccaacttgacaaatcttaatatccgagagatagaagaacatatgagacaaacgctgatagatgatccagataataacctcctgaaaatggccaaagcgggttataaagtaaatcctacagaactaatgtatattctaggtacgtatggacaacaaaggattgatggtgaaccagcagagactcgagtattgggtagagtcttaccttactatcttccagactctaaggatccagaaggaagaggttacattcttaattctttaacaaaaggattaacgggttctcaatattacttttcgatgctggttgccagatctcaatctactgatatcgtctgtgaaacatcacgtaccggaacactggctagaaaaatcattaaaaagatggaggatatggtggtcgacggatacggacaagtagttataggtaatacgctcatcaagtacgccgccaattataccaaaattctaggctcagtatgtaaacctgtagatcttatctatccagatgagtccatgacttggtatttggaaattagtgctctgtggaataaaataaaacagggattcgtttactctcagaaacagaaacttgcaaagaagacattggcgccgtttaatttcctagtattcgtcaaacccaccactgaggataatgctattaaggttaaggatctgtacgatatgattcataacgtcattgatgatgtgagagagaaatacttctttacggtatctaatatagattttatggagtatatattcttgacgcatcttaatccttctagaattagaattacaaaagaaacggctatcactatctttgaaaagttctatgaaaaactcaattatactctaggtggtggaactcctattggaattatttctgcacaggtattgtctgagaagtttacacaacaagccctgtccagttttcacactactgaaaaaagtggtgccgtcaaacaaaaacttggtttcaacgagtttaataacttgactaatttgagtaagaataagaccgaaattatcactctggtatccgatgatatctctaaacttcaatctgttaagattaatttcgaatttgtatgtttgggagaattaaatccagacatcactcttcgaaaagaaacagataaatatgtagtagatataatagttaatagattatacatcaagagagcagaaataaccgaattagttgtcgaatatatgattgaacgatttatctcctttagcgtcattgtaaaggaatggggtatggagacattcattgaggacgaggataatattagatttactgtctacctaaatttcgttgaaccggaagaattgaatcttagtaagtttatgatggttcttccgggtgccgccaacaagggcaagattagtaaattcaagattcctatctctgattatacgggttatgacgacttcaatcaaacaaaaaagctcaataagatgactgtagaactcatgaatctaaaagaattgggttctttcgatttggaaaacgtcaacgtgtatcctggagtatggaatacatacgatatcttcggtatcgaggccgctcgtgaatacttgtgcgaagccatgttaaacacctatggagaagggttcgattatctgtatcagccttgtgatcttctcgctagtttactatgtgctagttacgaaccagaatcagttaataaattcaagttcggtgcagctagtactcttaagagagctacgttcggagacaataaagcattgttaaacgcggctcttcataaaaagtcagaacctattaacgataatagtagctgccacttttttagcaaggtccctaatataggaactggatattacaaatactttatcgacttgggtcttctcatgagaatggaaaggaaactatctgataagatatcttctcaaaagatcaaggaaatggaagaaacagaagacttttaattcttatcaataacatatttttctatgatctgtcttttaaacgatggattttccacaaatgcgcctctcaagtccctcatagaatgatacacgtataaaaaatatagcataggcaatgactccttatttttagacattagatatgccaaaatcatagccccgcttctatttactcccgcagcacaatgaaccaacacgggctcgtttcgttgatcacatttagataaaaaggcggttacgtcgtcaaaatatttactaatatcggtagttgtatcatctaccaacggtatatgaataatattaatattagagttaggtaatgtatatttatccatcgtcaaatttaaaacatatttgaacttaacttcagatgatggtgcatccatagcatttttataatttcccaaatacacattattggttacccttgtcattatagtgggagatttggctttgtgcatatctccagttgaacgtagtagtaagtatttatacaaacttttcttatccatttataacgtacaaatggataaaactactttatcggtaaacgcgtgtaatttagaatacgttagagaaaaggctatagtaggcgtacaagcagccaaaacatcaacacttatattctttgttattatattggcaattagtgcgctattactctggtttcagacgtctgataatccagtctttaatgaattaacgagatatatgcgaattaaaaatacggttaacgattggaaatcattaacggatagcaaaacaaaattagaaagtgatagaggtagacttctagccgctggtaaggatgatatattcgacttcaaatgtgtggatttcggcgcctattttatagctatgcgattggataagaaaacatatctgccgcaagctattaggcgaggtactggagacgcgtggatggttaaaaaggcggcaaaggtcgatccatctgctcaacaattttgtcagtatttgataaaacacaagtctaataatgttattacttgtggtaatgagatgttaaatgaattaggttatagcggttattttatgtcaccgcattggtgttccgattttagtaatatggaatagtgttagataaatgcggtaacgaatgttcctgtaaggaaccataacagtttagatttaacgttaaagatgagcataaacataataaacaaaattacaatcaaacctataacattaatatcaaacaatccaaaaaatgaaatcagtggagtagtaaacgcgtacataactcctggataacgtttagcagctgccgttcctattctagaccaaaaattcggtttcatgttttcgaagcggtgttctgcaacaagtcggggatcgtgttctacatatttggcggcgttatccagtatctgcctattgatcttcatttcgttttcgattctggctatttcaaaataaaatcccgatgatagacctccagactttataatttcatctacgatgttcagcgccgtagtaactctaataatataggctgataagctaacatcataccctcctgtatatgtgaatatggcatgatttttgtccattacaagctcggttttaactttattgcctgtaataatttctctcatctgtaggatatctatttttttgtcatgcattgccttcaagacgggacgaagaaacgtaatatcctcaataacgttatcgttttctacaataactacatattctacctttttattttctaactcggtaaaaaaattagaatcccatagggctaaatgtctagcgatatttcttttcgtttcctctgtacacatagtgttacaaaaccctgaaaagaagtgagtatacttgtcatcatttctaatgtttcctccagtccactgtataaacgcataatccttgtaatgatctggatcatccttgactaccacaacatttcttttttctggcataacttcgttgtcctttacatcatcgaacttctgatcattaatatgctcatgaacattaggaaatgtttctgatggaggtctatcaataactggcacaacaataacaggagttttcaccgccgccatttagttattgaaattaatcatatacaactctttaatacgagttatattttcgtctatccattgtttcacatttacatatttcgacaaaaagatataaaatgcgtattccaatgcttctctgtttaatgaattactaaaatatacaaacacgtcactgtctggcaataaatgatatcttagaatattgtaacaatttattttgtattgcacatgttcgtgatctatgagttcttcttcgaatggcataggatctccgaatctgaaaacgtataaataggagttagaataataatatttgagagtattggtaatatataaactctttagcggtataattagtttttttctctcaatttctatttttagatgtgatggaaaaatgactaattttgtagcattagtatcatgaactctaatcaaaatcttaatatcttcgtcacacgttagctctttgaagtttttaagagatgcatcagttggttctacagatggagtaggtgcaacaattttttgttctacacatgtatgtactggagccattgttttaactataatggtgcttgtatcgaaaaactttaatgcagatagcggaagctcttcgccgcgactttctacatcgtaattgggttctaacgccgatctctgaatggatactagttttctaagttctaatgtgattctctgaaaatgtaaatccaattcctccggcattatagatgtgtatacatcggtaaataaaactatagtatccaacgatcccttctcgcaaattctagtcttaaccaaaaaatcgtatataaccacggagatggcgtatttaagagtggattcttctaccgttttgttcttggatgtcatataggaaactataaagtccgcactactgttaagaatgattactaacgcaactatatagttcaaattaagcattttggaaacataaaataactctgtagacgatacttgactttcgaataagtttgcagacaaacgaagaaagaacagacctctcttaatttcagaagaaaactttttttcgtattcctgacgtctagagtttatatcaataagaaagttaagaattagtcggttaatgttgtatttcattacccaagtttgagatttcataatattatcaaaagacatgataatattaaagataaagcgctgactatgaacgaaatagctatatggttcgctcaagaatatagtcttgttaaacgtggaaacgataactgtatttttaatcacgtcagcggcatctaaattaaatataggtatatttattccacacactctacaatatgccacaccatcttcataataaataaattcgttagcaaaattattaattttagtgaaatagttagcgtcaactttcatagcttccttcaatctaatttgatgctcacacggtgcgaattccactctaacatcccttttccatgcctcaggttcatcgatctctataatatctagtttcttgcgtttcacaaacacgggctcgtctctcgcgatgagatctgtatagtaactatgtaaatgataactagatagaaagatgtagctatatagatgacgatcctttaagagaggtataataactttaccccaatcagataaactattgttatggtcttcggaaaaagaatttttataaatttttccagtattttccaaatatacgtacttgacatctaaaaaatccttaatgataataggaatggataatccgtctattttataaagaaatacatatcgcacattatacttttttttggaaatgggaataccgatgtgtctacataaatatgcaaagtctaaatattttttagagaatcttagttggtccaaattcttttccaagtacggtaatagatttttcatattgaacggtatcttcttaatctctggttctagttccgcattaaatgatgaaactaagtcactatttttataactaacgattacatcacctctaacatcatcatttaccagaatactgatcttcttttgtcgtaaatacatgtctaatgtgttaaaaaaaagatcatacaagttatacgtcatttcatctgtggtattcttgtcattgaaggataaactcgtactaatctcttctttaacagcctgttcaaatttatatcctatatacgaaaaaatagcaaccagtgtttgatcatccgcgtcaatattctgttctatcgtagtgtataacaatcgtatatcttcttctgtgatagtcgatacgttataaaggttgataacgaaaatatttttatttcgtgaaataaagtcatcgtaggattttggacttatattcgcgtctagtagatatgcttttatttttggaatgatctcaattagaatagtctctttagagtccatttaaagttacaaacaactaggaaattggtttatgatgtataatttttttagtttttatagattctttattctatacttaaaaaatgaaaataaatacaaaggttcttgagggttgtgttaaattgaaagcgagaaataatcataaattatttcattatcgcgatatccgttaagtttgtatcgtaatggcgtggtcaattacaaataaagcggatactagtagcttcacaaagatggctgaaatcagagctcatctaaaaaatagcgctgaaaataaagataaaaacgaggatattttcccggaagatgtaataattccatctactaagcccaaaaccaaacgagccactactcctcgtaaaccagcggctactaaaagatcaaccaaaaaggaggaagtggaagaagaagtagttatagaggaatatcatcaaacaactgaaaaaaattctccatctcctggagtcagcgacattgtagaaagcgtggccgctgtagagctcgatgatagcgacggggatgatgaacctatggtacaagttgaagctggtaaagtaaatcatagtgctagaagcgatctttctgacctaaaggtggctaccgacaatatcgttaaagatcttaagaaaattattactagaatctctgcagtatcgacggttctagaggatgttcaagcagctggtatctctagacaatttacttctatgactaaagctattacaacactatctgatctagtcaccgagggaaaatctaaagttgttcgtaaaaaagttaaaacttgtaagaagtaaatgcgtgcacttttttataaagatggtaaactctttaccgataataattttttaaatcctgtatcagacgataatccagcgtatgaggttttgcaacatgttaaaattcctactcatttaacagatgtagtagtatatgaacaaacgtgggaggaggcgttaactagattaatttttgtgggaagcgattcaaaaggacgtagacaatacttttacggaaaaatgcatgtacagaatcgcaacgctaaaagagatcgtatttttgttagagtatataacgttatgaaacgaattaattgttttataaacaaaaatataaagaaatcgtccacagattccaattatcagttggcggtttttatgttaatggaaactatgttttttattagatttggtaaaatgaaatatcttaaggagaatgaaacagtagggttattaacactaaaaaataaacacatagaaataagtcccgatgaaatagttatcaagtttgtaggaaaggacaaagtttcacatgaatttgttgttcataagtctaatagactatataagccgctattgaaactgacggatgattctagtcccgaagaatttctgttcaacaaactaagtgaacgaaaggtatacgaatgtatcaaacagtttggtattagaatcaaggatctccgaacgtatggagtcaattatacgtttttatataatttttggacaaatgtaaagtccatatctcctcttccatcaccaaaaaagttaatagcgttaactatcaaacaaactgctgaagtggtaggtcatactccatcaatttcaaaaagagcttacatggcaacgactattttagaaatggtaaaggataaaaattttttagatgtagtatctaaaactacgttcgatgaattcctatctatagtcgtagatcacgttaaatcatctacggatggatgatatagatctttacacaaataattacaagaccgataaatggaaatggataagcgtatgaaatctctcgcaatgacagctttcttcggagagctaaacacattagatattatggcattgataatgtctatatttaaacgccatccaaacaataccattttttcagtggataaggatggtcagtttatgattgatttcgaatacgataattataaggcttctcaatatttggatctgaccctcactccgatatctggagatgaatgcaagactcacgcatcgagtatagccgaacaattggcgtgtgtggatattattaaagaggatattagcgaatatatcaaaactactccccgtcttaaacgatttataaaaaaataccgcaatagatcagatactcgtatcagtcgagatacagaaaagcttaaaatagctctagctaaaggcatagattacgaatatataaaagacgcttgttaataagtaaatgaaaaaaaactagtcgtttataataaaacacaatatggatgccaacatagtatcatcttctactattgcaacgtatatagacgctttagcaaagaatgcttcagaattagaacagaggtctaccgcatacgaaataaataatgaattggaactagtatttattaagccgccattaattactttgacaaatgtagtgaatatctctacgattcaggaatcgtttattcgatttaccgttactaataaggaaggtgtcaaaattagaactaagattccattatctaaggtacatggtctagatgtaaaaaatgtacagttagtagatgctatagataacatagtttgggaaaagaaatcattagtgacggaaaatcgtcttcacaaagaatgcttgttgagactatcgacagaggaacgtcatatatttttggattacaagaaatatggatcctctatccgactagaattagtcaatcttattcaagcaaaaacaaaaaactttacgatagactttaagctaaaatattttctaggatccggtgcccaatctaaaagttctttgttgcacgctattaatcatccaaagtcaaggcctaatacatctctggaaatagaattcacacctagagacaatgaaaaagttccatatgatgaactaataaaggaattgacgactctatcacgtcatatatttatggcttctccagagaatgtaattctttctccgcctattaacgcacctataaagacttttatgttgcctaaacaagatatagtaggtctggatctggaaaatctatatgccgtaactaagactgacggcattcctataactatcagagttacatcaaacgggttgtattgttattttacacatcttgggtatattattagatatccagttaagagaataatagattccgaagtagtagtctttggtgaggcagttaaggataagaactggaccgtatatctcattaagctaatagagcctgtgaatgcaatcaatgatagactagaagaaagtaagtatgttgaatctaaactagtggatatttgtgatcggatagtattcaagtcaaagaaatatgaaggtccgtttactacaactagtgaagtcgtcgatatgttatctacatatttaccaaagcaaccagaaggtgttattctgttctattcaaagggacctaaatctaacattgattttaaaattaaaaaggaaaatactatagaccaaactgcaaatgtagtatttaggtacatgtccagtgaaccaattatctttggagaatcgtctatctttgtagagtataagaaatttagcaacgataaaggctttcctaaagaatatggttctggtaagattgtgttatataacggcgttaattatctaaataatatctattgtttggaatatattaatacacataatgaagtgggtattaagtccgtggttgtacctattaagtttatagcagaattcttagttaatggagaaatacttaaacctagaatcgataaaaccatgaaatatattaactcagaagattattatggaaatcaacataatatcatagtcgaacatttaagagatcaaagcatcaaaataggagatatctttaacgaggataaactatcggatgtgggacatcaatacgccaataatgataaatttagattaaatccagaagttagttattttacgaataaacgaactagaggaccgttgggaattttatcaaactacgtcaagactcttcttatttctatgtattgttccaaaacatttttagacgattccaacaaacgaaaggtattggcgattgattttggaaacggtgctgacctggaaaaatacttttatggagagattgcgttattggtagcgacggatccggatgctgatgctatagctagaggaaatgaaagatacaacaaattaaactctggaattaaaaccaagtactacaaatttgactacattcaggaaactattcgatccgatacatttgtctctagtgtcagagaagtattctattttggaaagtttaatatcatcgactggcagtttgctatccattattcttttcatccgagacattatgctaccgtcatgaataacttatccgaactaactgcttctggaggcaaggtattaatcactaccatggacggagacaaattatcaaaattaacagataaaaagacttttataattcataagaatttacctagtagcgaaaactatatgtctgtagaaaaaatagctgatgatagaatagtggtatataatccatcaacaatgtctactccaatgactgaatacattatcaaaaagaacgatatagtcagagtgtttaacgaatacggatttgttcttgtagataacgttgatttcgctacaattatagaacgaagtaaaaagtttattaatggcgcatctacaatggaagatagaccgtctacaaaaaactttttcgaactaaatagaggagccattaaatgtgaaggtttagatgtcgaagacttacttagttactatgttgtttatgtcttttctaagcggtaaataataatatggtatgggttctgatatccccgttctaaatgcattaaataattccaatagagcgatttttgttcctataggaccttccaactgtggatactctgtattgttaatagatatattaatacttttgtcgggtaacagaggttctacgtcttctaaaaataaaagtttgataacatctggcctgttcataaataaaaacttggcgattctatatatactcttattatcaaatctagccattgtcttatagatgtgagctactgtaggtgtaccatttgattttctttctaatactatatatttctctcgaagaagttcttgcacatcatctgggaataaaatactactgttgagtaaatcagttattttttttatatcgatattgatggacatttttatagttaaggataataagtatcccaaagtcgataacgacgataacgaagtatttatacttttaggaaatcacaatgactttatcagatcaaaattaacaaaattaaaggagcatgtatttttttctgaatatattgtgactccagatacatatggatctttatgcgtcgaattaaatgggtctagttttcagcacggtggtagatatatagaggtggaggaatttatagatgctggaagacaagttagatggtgttctacatccaatcatatatctgaagatatacccgaagatatacacactgataaatttgtcatttatgatatatacacttttgacgctttcaagaataaacgattggtattcgtacaggtacctccgtcgttaggagatgatagctatttgactaatccgttattgtctccgtattatcgtaattcagtagccagacaaatggtcaatgatatgatttttaatcaagattcatttttaaaatatttattagaacatctgattagaagccactatagagtttctaaacatataacaatagttagatacaaggataccgaagaattaaatctaacgagaatatgttataatagagataagtttaaggcgtttgtattcgcttggtttaacggcgtttcggaaaatgaaaaggtactagatacgtataaaaaggtatctaatttgatataatgaattcagtgactgtatcacacgcgccatatactattacttatcacgatgattgggaaccagtaatgagtcaattggtagagttttataacgaagtagccagttggctgctacgagacgagacgtcgcctattcctgataagttctttatacagttgaaacaaccgcttagaaataaacgagtatgtgtgtgcggtatagatccgtatccgaaagatggaactggtgtaccgttcgaatcaccaaattttacaaaaaaatcaattaaggagatagcttcatctatatctagattaaccggagtaattgattataaaggttataaccttaatataatagacggggttataccctggaattattacttaagttgtaaattaggagaaacaaaaagtcacgcgatctactgggataagatttccaagttactgctgcagcatataactaaacacgttagtgttctttattgtttgggtaaaacagatttctcgaatatacgggcaaagttagaatccccggtaactaccatagtgggatatcatccagcggctagagaccgtcaattcgagaaagatcgatcatttgaaattatcaacgttttactggaattagacaacaaggtacctataaattgggctcaagggtttatttattaatgctttagtgaaattttaacttgtgttctaaatggatgcggctattagaggtaatgatgttatctttgttcttaagactataggtgtcccgtcagcgtgcagacaaaatgaagatccaagatttgtagaagcatttaaatgcgacgagttagaaagatatattgagaataatccagaatgtacactattcgaaagtcttagggatgaggaagcatactctatagtcagaattttcatggatgtagatttagacgcgtgtctagacgaaatagattatttaacggctattcaagattttattatcgaggtgtcaaactgtgtagctagattcgcgtttacagaatgcggcgccattcatgaaaatgtaataaaatccatgagatctaatttttcattgactaagtctacaaatagagataaaacaagttttcatattatctttttagacacgtataccactatggatacattgatagctatgaaacgaacactattagaattaagtagatcatctgaaaatccactaacaagatcgatagacactgccgtatataggagaaaaacaactcttcgggttgtaggtactaggaaaaatccaaattgcgacactattcatgtaatgcaaccacctcatgataatatagaagattacctattcacttacgtggatatgaacaacaatagttattacttttctctacaacgacgattggaggatttagttcctgataagttatgggaaccagggtttatttcattcgaagacgctataaaaagagtttcaaaaatattcattaattctataataaactttaatgatctcgatgaaaataattttacaacggtaccactggtcatagattacgtaacaccttgtgcattatgtaaaaaacgatcgcataaacatccgcatcaactatcgttggaaaatggtgctattagaatttacaaaactggtaatccacatagttgtaaagttaaaattgttccgttggatggtaataaactgtttaatattgcacaaagaattttagacactaactctgttttattaaccgaacgaggagaccatatagtttggattaataattcatggaaatttaacagcgaagaacccttgataacaaaactaattttgtcaataagacatcaactacctaaggaatattcaagcgaattactctgtccaagaaaacgaaagactgtagaagctaacatacgagacatgttagtagattcagtggagaccgatacctatccggataaacttccgtttaaaaatggtgtattggacctggtagacggaatgttttactctggagatgatgctaaaaaatatatgtgtactgtatcaaccggatttaaatttgacgatacaaagttcgtcgaagacagtccagaaatggaagagttaatgaatatcattaacgatatccaaccattaacggatgaaaataagaaaaatagagagctatatgaaaaaacattatctagttgtttatgcggtgctaccaaaggatgtttaacattcttttttggagaaactgcaactggaaagtcgacaaccaaacgtttgttaaagtctgctatcggtgacctgtttgttgagacgggtcaaacaattttaacagatgtattggataaaggacctaatccatttatcgctaacatgcatttgaaaagatctgtattctgtagcgaactacctgattttgcatgtagtgggtcaaagaaaatcagatctgataatattaaaaagttgacagaaccttgtgtcattggaagaccgtgtttctccaataaaattaataatagaaaccatgcgacaatcattatcgatactaattacaaacctgtttttgataggatagataacgcattaatgagaagaattgccgtcgtgcgattcagaacacacttttctcaaccttctggtagagaggctgctgaaaataatgacgcgtacgataaagtcaaactattagacgaggggttagatggtaaaatacaaaataatagatatagattcgcatttctatacttgttggtgaaatggtacagaaaatatcatgttcctattatgaaactatatcctacacccgaagagattcctgactttgcattctatctcaaaataggtactctgttggtatctagctctgtaaagcatattccattaatgacggacctctccaaaaagggatatatattgtacgataatgtggtcactcttccgttgactactttccaacagaaaatatccaagtattttaattctagactatttggacacgatatagagagcttcatcaatagacataagaaatttgccaatgttagtgatgaatatctgcaatatatattcatagaggatatttcatctccgtaaatatatgctcatatatttatagaagatatcacatatctaaatgaataccggaattatagatttatttgataatcatgttgatagtataccaactatattacctcatcagttagctactctagattatctagttagaactatcatagatgagaacagaagcgtgttattgttccatattatgggatcaggtaaaacaataatcgctttgttgttcgccttggtagcttccagatttaaaaaggtttacattctagtgccgaacatcaacatcttaaaaattttcaattataatatgggtgtagctatgaacttgtttaatgacgaattcatagctgagaatatctttattcattccacaacaagtttttattctcttaattataacgataacgtcattaattataacggattatctcgctacaataactctatttttatcgttgatgaggcacataatatctttgggaataatactggagaacttatgaccgtgataaaaaataaaaacaagattccttttctactattgtctggatctcccattactaacacacctaatactctgggtcatattatagatttaatgtccgaagagacgatagattttggtgaaattattagtcgtggtaagaaagtaattcagacacttcttaacgaacgcggtgtgaatgtacttaaggatttgcttaaaggaagaatatcatattacgaaatgcctgataaagatctaccaacgataagatatcacggacgtaagtttctagatactagagtagtatattgtcacatgtctaaacttcaagagagagattatatgattactagacgacagctatgttatcatgaaatgtttgataaaaatatgtataacgtgtcaatggcagtattgggacaacttaatctgatgaataatttagatactttatttcaggaacaggataaggaattgtacccaaatctgaaaataaataatggcgtgttatacggagaagaattggtaacgttaaacattagttccaaatttaaatactttattaatcggatacagacactcaacggaaaacattttatatacttttctaattctacatatggcggattggtaattaaatatatcatgctcagtaatggatattctgaatataatggttctcagggaactaatccacatatgataaacggcaaaccaaaaacatttgctatcgttactagtaaaatgaaatcgtctttagaggatctattagatgtgtataattctcctgaaaacgatgatggtagtcaattgatgtttttgttttcatcaaacattatgtccgaatcctatactctaaaagaggtaaggcatatttggtttatgactatcccagatactttttctcaatacaaccaaattcttggacgatctattagaaaattctcttacgccgatatttctgaaccagttaatgtatatcttttagccgccgtatattccgatttcaatgacgaagtgacgtcattaaacgattacacacaggatgaattaattaatgttttaccatttgacatcaaaaagctgttatatctaaaatttaagacgaaagaaacgaatagaatatactctattcttcaagagatgtctgaaacgtattctcttccaccacatccatcaattgtaaaagttttattgggagaattggtcagacaatttttttataataattctcgtattaagtataacgataccaagttacttaaaatggttacatcagttataaaaaataaagaagacgctaggaattacatagatgatattgtaaacggtcacttctttgtatcgaataaagtatttgataaatctcttttatacaaatacgaaaacgatattattacagtaccgtttagactttcctacgaaccatttgtttggggagttaactttcgtaaagaatataacgtggtatcttctccataaaactgatgagatatataaagaaataaatgtcgagctttgttaccaatggataccttccagttacattggagccacacgagctgacgttagacataaaaactaatattaggaatgccgtatataagacgtatctccatagagaaattagtggtaaaatggccaagaaaatagaaattcgtgaagacgtggaattacctctcggcgaaatagttaataattctgtagttataaacgttccgtgtgtaataacctacgcgtattatcacgttggggatatagttagaggaacattaaacatcgaagatgaatcaaatgtaactattcaatgtggagatttaatctgtaaactaagtagagattcgggtactgtatcatttagcgattcaaagtactgcttttttcgaaatggtaatgcgtatgacaatggcagcgaagtcactgccgttctaatggaggctcaacaaggtatcgaatctagttttgtttttctcgcgaatatcgtcgactcataagaaagagaatagcggtaagtataaacacgaatactatggcaataattgcgaatgttttattcccttcgatatatttttgataatatgaaaaacatgtctctctcaaatcggacaaccatctcataaaatagttatctcgcgctggcgaggtggttgccgctcgtataatctccccagaataatatacttgcgtgtcgtcgttcaatttatacggatttctatagttctctgttatataatgcggttttccatcatgattagacgacgacaatagtgttctaaatttagatagttgatcagaatgaatgtttattggcgttggaaaaattatccatgctgcgtctgcagagtggttgatagttgttcctagatatgtaaaataatccaacgtactaggtagcaaattgtctagataaaatactgaatcaaacggcgcagacgtattagcggatctaatggaatccaattgattgactatcttttgaaaatatacatttttatgatccgatacttgtaagaatatagaaataatgataagtccatcatcgtgtttttttgcctcttcataagaactatattttttcttattccaatgaacaagattaatctctccagagtatttgtacacatctatcaagtgattggatccataatcgtcttcctttccccaatatatatgtagtgatgataacacatattcattggggagaaaccctccacttatatatcctcctttaaaattaatccttactagttttccagtgttctggatagtggttggtttcgactcattataatgtatgtctaacggcttcaatcgcgcgttagaaattgcttttttagtttctatattaataggagatagttgttgcggcatagtaaaaatgaaatgataactgtttaaaaatagctcttagtatgggaattacaatggatgaggaagtgatatttgaaactcctagagaattaatatctattaaacgaataaaagatattccaagatcaaaagacacgcatgtgtttgctgcgtgtataacaagtgacggatatccgttaataggagctagaagaacttcattcgcgttccaggcgatattatctcaacaaaattcagattctatctttagagtatccactaaactattacggtttatgtactacaatgaactaagagaaatctttagacggttgagaaaaggttctatcaacaatatcgatcctcactttgaagagttaatattattgggtggtaaactagataaaaaggaatctattaaagattgtttaagaagagaattaaaagaggaaagtgatgaacgtataacagtaaaagaatttggaaatgtaattctaaaacttacaacacgggataaattatttaataaagtatatataggttattgcatggcgtgttttattaatcaatcgttggaggatttatcgcatactagtatttacaatgtagaaattagaaagattaaatcattaaatgattgtattaacgacgataaatacgaatatctgtcttatatttataatatgctagttaatagtaaatgaacttttacagatctagtataattagtcagattattaagtataatagacgactagctaagtctattatttgcaaggatgactctcaaattattacactcacggcattcgttaaccaatgcctatggtgtcataaacgagtatccgtgtccgctattttattaactactgataacaaaatattagtatgtaacagacgagatagttttctctattctgaaataattagaactagaaacatgtttagaaagaaacgattatttctgaattattccaattatttgtccaaacaggaaagaagtatactatcgtcatttttttctctatatccagctactgctgataatgatagaatagacgctatttatccgggtggcatacccaaaaggggtgagaatgttccagagtgtctatccagggaaatcaaagaagaagttaatatagacaattcttttgtattcatagacactcggttttttattcatggtatcatagaagataccattatcaacaaattttttgaggtaattttctttgtcggaagaatatctctaacgagtgatcaaattattgatacctttaaaagtaatcatgaaatcaaggatctaatatttttagatccgaattcaggtaatggactccaatacgaaattgcaaaatatgctctagatactgcaaaacttaaatgttacggccatagaggatgttattatgaatcattaaaaaaattaactgaggatgattgattagaaaatataaattaatttaccatcgtgtatttttataacgggattgtccggcatatcatgtagatagttaccgtctacatcgtatactcgaccatctacgcctttaaatcctctatttattgacattaatctattagaattggaataccaaatattagtaccctcaattagtttattggtaatattttttttagacgatagatcgatggctcttgaaaccaaggttttccaaccggactcattgtcgatcggtgagaagtctttttcattagcatgaatccattctaatgatgtatgtttaaacactctaaacaattggacaaattcttttgatttgctttgaatgatttcaaataggtcttcgtctacagtaggcataccattagataatctagccattataaagtgcacgtttacatatctacgttctggaggagtaagaacgtgactattgagacgaatggctcttcctactatctgacgaagagacgcctcgttccatgtcatatctaaaatgaagatatcattaattgagaaaaaactaataccctcgcctccactagaagagaatacgcatgttttaatgcattctccgttagtgtttgattcttggttaaactcagccaccgccttgattctagtatcttttgttctagatgagaactctatattagagataccaaagactttgaaatatagtaataagatttctattcctgactgattaacaaatggttcaaagactagacatttaccatgggatgctaatattcccaaacatacatctataaatttgacgcttttctcttttaattcagtaaatagagagatatcagccgcactagcatcccctttcaatagttctccctttttaaaggtatttaatgcggatttagaaaactctctatctcttaatgaatttttaaaatcattatatagtgttgctatctcttgcgcgtattcgccgggatcacgattttgtctttcaggaaagctatcgaacgtaaacgtagtagccatacgtctcagaattctaaatgatgatataccagtttttatttctgcgagtttagccttttgataaatctcttcttgcttttttgacatattaacgtatcgcattaatactgttttcttagcgaatgatgcagacccttctacgttatcaaaaatagaaaactcgttattaactatgtacgaacataggcctcctagtttggagactaattctttttcatcgactagacgtttattctcaaatagtgattggtgttgtaaggatcctggtcgtagtaagttaaccaacatggtgaattcttgcacactattgacgataggtgtagccgataaacaaatcatcttatggttttttaatgcgatggtcttggataaaaaattatatactgaacgagtaggacggatcttaccatcttctttgattaatgatttagaaatgaagttatgacattcatcaataatgacgcatattctactcttggaattaatagttttgatattagtaaaaaatttatttctaaaattttgatcatcgtaattaataaaaatacaatccttcgttatctctggagcgtatctgagtatagtgttcatccaaggatcttctatcaaagcctttttcaccaataagataatagcccaattcgtataaatatccttaagatgtttgagaatatatacagtagtcattgttttaccgacacccgtttcatggaacaataaaagagaatgcatactgtctaatcctaagaaaactcttgctacaaaatgttgataatccttgaggcgtactacgtccgaccccatcatttcaacgggcatattagtagttctgcgtaaggcataatcgatataggccgcgtgtgatttactcatttatgagtgataagtaataactatgttttaaaaatcacagcagtagtttaactagtcttctctgatgtttgttttcgatactttttgaatcagaagtcatactagaataaagcaacgagtgaacgtaatagagagcttcgtatactctattcgaaaactctaagaacttattaatgaattccgtatccactggattgtttaaaatactaaattgaacactgttcacatccttccaagaagaagacttagtgacggacttaacatgagacataaataaatccaaattttttttacaaacatcactagccaccataatggcgctatctttcaaccagctatcgcttacgcattttagcagtctaacatttttaaagagactacaatatattctcatagtatcgattacacctctaccgaataaagttggaagtttaataatacaatatttttcgtttacaaaatcaaataatggtcgaaacacgtcgaaggttaacatcttataatcgctaatgtatagattgttttcagtgagatgattattagatttaatagcatctcgttcacgtttgaacagtttattgcgtgcgctgaggtcggcaactacggcgtccgctttagtactcctcccataatactttacgctattaatctttaaaatttcatagactttatctagatcgctttctggtaacatgatatcatgtgtaaaaagttttaacatgtcggtcggcattctatttagatcattaactctagaaatctgaagaaagtaattagctccgtattccagactaggtaatgggcttttacctagagacagattaagttctggcaatgtttcataaaatggaagaaggacatgcgttccctcccggatattttttacaatttcatccatttacaactctatagtttgttttcattattattagttattatctcccataatcttggtaatacttaccccttgatcgtaagataccttatacaggtcattacatacaactaccaattgtttttgtacataatagattggatggttgacatccatggtggaataaactactcgaacagatagtttatctttccccctagatacattggccgtaatagttgtcggcctaaagaatatctttggtgtaaagttaaaagttagggttcttgttccattattgctttttgtcagtagttcattataaattctcgagatgggtccgttctctgaatatagaacatcatttccaaatctaacttctagtctagaaataatatcggtcttattcttaaaatctattcccttgatgaagggatcgttaatgaacaaatccttggcctttgattcggctgatctattatctccgttatagacgttacgttgactagtccaaagacttacaggaatagatgtatcgatgatgttgatactatgtgatatgtgagcaaagattgttctcttagtggcatcactatatgttccagtaatggcggaaaactttttagaaatgttatatataaaagaattttttcgtgttccaaacattagcagattagtatgaagataaacactcatattatcaggaacattatcaatttttacatacacatcagcatcttgaatagaaacgataccatcttctggaacctcaacaatctcggcagactccggataaccagtcggtggaccatcgctaacaataactagatcatccaacaatctactcacatatgcatctatataatctttttcatcttgtgagtaccctggatacgaaataaatttattatccgtatttccataataaggtttagtataaacagagagcgatgttgccgcatgaacttcagttacagtcgccgttggttggtttatttgacctattactctcctaggtttctctataaacgatggtttaatttgtacattcttaaccatatatccaataaagctcaattcaggaacataaacaaattctttgttgaacgtttcaaagtcgaacgaagagtcacgaataacgatatcggatactggattgaaggttaccgttacggtaatttttgaatcggatagtttaagactgctgaatgtatcttccacatcaaacggagttttaatataaacgtatactgtagatggttctttaatagtgtcattaggagttaggccaatagaaatatcattaagttcactagaatatccagagtgtttcaaagcaattgtattattgatacaattattatataattcttcgccctcaatttcccaaataacaccgttacacgaagagatagatacgtgattaatacatttatatccaacatatggtacgtaaccgaatcttcccatacctttaacttctggaagttccaaactcagaaccaaatgattaagcgcagtaatatactgatccctaatttcgaagctagcgatagcctgattgtctggaccatcgtttgtcataactccggatagagaaatatattgcggcatatataaagttggaatttgactatcgactgcgaagacattagaccgtttaatagagtcatccccaccgatcaaagaattaatgatagtattattcattttctatttaaaatggaaaaagcttacaataaactccgtagagaaatatctataatttgtgagttttccttaaagtaacagcttccgtaaacgccgtctttatctcttagtaagtttattgtatttataaccttttccttatcttcatagaatactaaaggcaacaaagaaatttttggttcttctctaagagctacgtgagacttaaccatagaagccaacgaatccctacatattttagaacagaaataccctacttcaccacccttgtatgtctcaatactaataggtctaaaaaccaaatcttgattacaaaaccaacacttatcaattacactatttgtcttaatagacacatctgccatagatttataatactttggtagtatacaagcgagtgcttcttctttagcgggcttaaagactgctttaggtgctgaaataaccacatctggaaggcttactcgcttagccatttaattacggaactatttttttatacttctaatgagcaagtagaaaacctctcatctacaaaaacatactcgtgtccataatcctctaccatagttacacgttttttagatctcatatgtgctaaaaagttttcccatactaattggttactattatttttcgtataatttttaacagtttgaggttttagatttttagttacagaagtgatatcgaatattttatccaaaaagaatgaataattaattgtcttagaaggagtgttttcttggcaaaagaataccaagtgcttaaatatttctactacttcattaatcttttctgtactcagattcagtttctcatcttttacttgattgattatttcaaagactaacttataatcctttttatttattctctcgttagccttaagaaaactagatacaaaatttgcatctacatcatccgtggatatttgatttttttccatgatatccaagagttccgagataatttctccagaacattgatgagacaataatctccgcaatacatttctcaaatgaataagtttattagacacgtggaagtttgactttttttgtacctttgtacatttttgaaataccgactcgcaaaaaatacaatattcatatccttgttcagatactataccgttgtgtctacaaccgctacataatcgtagattcatgttaacactctacgtatctcgtcgtccaatattttatataaaaacattttatttctagacgttgccagaaaatcctgtaatacttttagttttttgggctgtgaataaagtatcgccctaatatggttaccgtcctccgccaatatagtagttaaattatccgcacatgcaaaagaacaccgcttaggcggattcagtacaatgttatatttttcgtaccaactcatttaaatatcataatctaaaatagttctgtaatatgtctagcgctaatatattgatcataatcctgtgcataaattaagatacaacaatgtctcgaaatcatcgacatggcttcttccatagttagaagatcgtcgtcaaagttagcaacgtgattcatcaacatttgctgttttgaggcagcaaatactgaaccgtcgccattcaaccattcataaaaaccatcgtctgaatccattgataatttcttgtactggtttttgagagctcgcatcaatctagcatttctagctcccggattgaaaacagaaagaggatcgtacatccagggtccattttctgtaaatagaatcgtataatgtcccttcaagaagatatcagacgatccacaatcaaagaattggtctccgagtttgtaacaaactgcggactttaacctatacatgataccgtttagcataatttctggtgatacgtcaatcggagtatcatctattagagatctaaagccggtgtaacattctccaccaaacatattcttattctgacgtcgttctacataaaacatcattgctccattaacgataacaggggaatgaacagcactacccatcacattagttcccaatggatcaatgtgtgtaactccagaacatcttccatagcctatgttaggaggagcgaacaccactcttccactattgccatcgaatgccatagaataaatatccttggaattgatagaaatcggactgtcggatgttgtgatcatcttcataggattaacaacgatgtatggtgccgcctgaagtttcatatcgtaactgatgccgttcataggtctagccacagaaaccaacgtaggtctaaatccaactatagacaaaatagaagccaatatctgttcctcatctgtcataacttgagagcatccagtatgaataatcttcattagatggggatctaccgcatcatcatcgttacaataaaaaattcccattctaatgttcataattgcttttctaatcatggtatgcatgtttgctctctgaatctctgtggaaattagatctgatacacctgtaatcactatcggattatcctccgtaagacgattaaccaacaacatataattataagactttacttttctaaattcataaagttgctggattaggctataggtgtctccatgtacatacgcgttctcgagcgcaggaagtttaataccgaatagtgccatcagaataggatgaatatagtaattagtttctggttttctataaataaaagacaaatcttgtgaactagacatatcggtaaaatgcatggattggaatcgtgtagtcgacagaagaatatgatgattagatggagagtatattttatctaactctttgagttggtcaccgattctaggactagctcgagaatgaataagtactaaaggatgagtacatttcacagaaacactagcattgttcaatgtgctctttacatgggtaaggagttgaaatagctcgtttctatttgttctgacaatatttagtttattcataatgttaagcatatcctgaatagtaaagttagatgtgtcatacttgttagtagttagatatttagcaattgcattcccatcatttctcaatctcgtactccaatcatgcgtggatgctacttcgtcgatggaaaccatacaatcctttttgataggctgttgagattgattatttcctgcacgtttaggtttggtacgttgatttctagcccctgcggatataaagtcatcgtctacaatttgggacaatgaattgcatacactacaagacaaagatttatcagaagtgtgaatatgatcttcatctaccaaagaaagagtttgattagtataactagattttagtcctgcgttagatgttaaaaaaacatcgctattgaccacggcttccattatttatattcgtagtttttactcgaaagcgtgattttaatatccaatcttattacttttggaatcgttcaaaacctttgactagttgtagaatttgatctattgccctacgcgtatactcccttgcatcatatacgttcgtcaccagatcgtttgtttcggcctgaagttggtgcatatctttttcaacactcgacatgagatccttaagggccatatcgtctagattttgttgagatgctgctcctggatttggattttgttgtgctgttgtacatactgtaccaccagtaggtgtaggagtacatacagtggccacaataggaggttgaggaggtgtaaccgttggagtagtacaagaaatatttccatccgattgttgtgtacatgtagttgttggtaacgtctgagaaggttgggtagatggcggtgtcgtcgtcttttgatctttattaaatttagagataatatcctgaacagcattgctcggcgtcaacgctggaaggagtgaactcgccggcgcatcagtatctgcagacagccaatcaaaaagattagacatatcagatgatgtattagtttgttgtcgtggttttggtgtaggagcagtactactaggtagaagaataggagccgatgtaggtgtcggaaccggctgtggagttatatgaatagttggttgtagcggttggataggctgtctgctggcggccatcatattatctctagctagttgttctcgcaactgtctttgataatacgactcttgagactttagtcctatttcaatcgcttcatcctttttcgtatccggatccttttcttcagaataatagattgacgactttggtgtagaggattctgccagcccctgtgagaacttgttaaagaagtccatttaaggctttaaaattgaattgcgattataagattaaatggcagacacagacgatattatcgactatgaatccgatgatctcactgaatacgaggatgatgaagaagaggaagaagatggagagtcactagaaactagtgatatagatcccaaatcttcttataagattgtagaatcagcatccactcatatagaagatgcgcattccaatcttaaacatatagggaatcatatatctgctcttaaacgacgctatactagacgtataagtctatttgaaatagcgggtataatagcagaaagctataacttgcttcaacgaggaagattacctctagtttcagaattttctgacgaaacgatgaagcaaaatatgctacatgtaattatacaagagatagaggagggttcttgtcctatagtcatcgaaaagaacggagaattgttgtcggtaaacgattttgacaaagatggtctaaaattccatctagactatattatcaaaatttggaaacttcaaaaacgatattagaatttatacgaatatcgttctctaaatgtcacaatcaagtctcgcatgttcagcaatttattgtcgtactttatatcgtgttcattaacgatatcttgcaaaatagtaatgattctatcttccttcgatagatattcttcagagattattgtcttatattctttcttgttatcagatatgaatttgataagactttgaacattattgatacccgtctgtttaattttttctacagatattttagttttggcagattctatcgtatctgtcaatagacatccaacatcgacattcgacgtcaattgtctataaatcaacgtataaattttagaaataacattagcgaattgttgtgcattgatgtcgttattctgaaacagtatgattttaggtagcattttcttaacaaagagaacgtatttattgttactcagttgaacagatgatatatccagattactaacgcatctgattccgtataccaaactttcagaagaaatggtatacaattgtttgtattcattcaatgtctctttttcagaaattagtttagagtcgaatactgcaataattttcaagagatagttttcatcagataagattttatttagtgtagatatgataaaactattgttttgttggagaacttgatacgccgcgttctctgtagtcgacgctctcaaatgggaaacgatctccattatttttttggaatcggatactatatcttcggtatcttgacgcagtctagtatacatagagttaagagagattagagtttgtacattaagcaacatgtctctaaatgtggctacaaacttttccttttccacatcatctagtttattatataccgatttcacaacggcaccagatttaaggaaccagaatgaaaaactctgataactacaatatttcatcatagttacgattttatcatcttctatagttggtgtaatagcgcatacctttttctccaagactggaaccaacgtcataaaaatgtttaaatcaaaatccatatcaacatctgatgcgctaagaccagtctcgcgttcaagattatctttactaatggtgacgaactcatcgtatagaactctaagtttgtccattatttatttacagatttagttgtttaatttatttgtgctcttccagagttgggatagtatttttctaacgtcggtattatattattaggatctacgttcatatgtatcataatattaatcatccacgttttgataaatctatctttagcttctgaaataacgtatttaaacaaaggagaaaaatatttagctacggcatcagacgcaataacattttttgtaaatgtaacgtatttagacgacagatcttcgttaaaaagttttccatctatgtagaatccatcagttgttaacaccattcccgcgtcagattgaataggagtttgaatagtttgttttggaaatagatccttcaataacttatagttgggtgggaaaaaatcgattttatcactagactctttcttttttactatcattacctcatgaactatttcttgaatgagtatatgtattttctttcctatatcggacgcgttcattggaaaatataccatgtcgttaactataagaatatttttatcctcgtttacaaactgaataatatcagatgtagttcgtaaacgaactatatcatcaccagcacaacatctaactatatgatatccactagtttcctttagtcgtttattatcttgttccatattagcagtcattccatcatttaagaaggcgtcaaagataatagggagaaatgacattttggattctgttacaactttaccaaaattaaggatatacggacttactatctttttctcaacgtcaatttgatgaacacacgatgaaaatgtacttcgatgagattgatcatgtagaaaacaacaagggatacaatatttccgcatatcatgaaatatattaagaaatcccaccttattatatttccccaaaggatccatgcacgtaaacattatgccgttatcattaataaagacttctttctcatcggatctgtaaaagttgttactgatttttttcattccaggatctagataattaataatgatgggttttctattcttattctttgtattttggcatatcctagaccagtaaacagtttccactttggtaaaatcagcagacttttgaacgctattaaacatggcattaatggcaataactaaaaatgtaaaatatttttctatgttaggaatatggtttttcactttaatagatatatggtttttggccaaaatgatagatatttttttatccgaggatagtaaaatattattagtcgccgtctctataaaaatgaagctagtctcgatatccaattttattctagaattgataggagtcgccaaatgtaccttatacgttatatctcccttgatgcgttccatttgtgtatctatatcggacacaagatctgtaaatagttttacgttattaatcatcacggtatcgccgtcgctagataatgctaatgtaccatccaagtcccaaatggagagatttaactgttcatcgtttagaataaaatgattaccggtcatattaataaagtgttcatcgtatctagataacaacgacttataattaatgtccaagtcttgaactcgctgaatgatcttttttaacccagttagttttagattggtacgaaatatattgttaaactttgattctacagtaatgtccaaatctagttgtggaaatacttccatcaacattgtttcaaacttgataatattattatctacatcttcatacgatccaaattccggaatagatgtatcacatgctcttgccacccagataaccaaaaagtcacacgctccaggatatacattgtataaaaagctatcgtttttaagtagggtttttttctgcgtgtatacgaagggattaaaaatagtattatcaacgtaactatattccaaattattcttatgagaatagataataatatcgtccttaatatctaacaaatttcctaaatatccctttaattgagtcattcgaagcgtcaatagaatatgtctcttaactatttccggctgttgtatatttaaatgacttcgtaaaaaataatatatgggcgacttctcatctatgtaatcatatggagtgagatatagggctcgttctacctcctgccccttacccacctgtaataccaattgcggacttactatatatcgcatatttatatcgtggggtaaagtgaaaatctactaccgatgatgtaagtcttacaatgttcgaaccagtaccagatcttaatttggaggcctccgtagaactaggggaggtaaatatagatcaaacaacacctatgataaaggaaaatagcggttttatatcccgtagtagacgtctattcgcccatagatctaaggatgatgagagaaaactagcactacgattctttttacaaagactttattttttagatcatagagagattcattatttgttcagatgcgttgacgctgtaaaagacgtcactattaccaaaaaaaataacattatcgtggcgccttatatagcacttttaactatcgcatcaaaaggatgcaaacttacagaaacaatgattgaagcattctttccagaactatataatgaacatagtaagaaatttaaattcaactctcaagtatccatcatccaagaaaaactcggataccagtttggaaactatcacgtttatgattttgaaccgtattactctacagtagctctggctattcgagatgaacattcatctggcatttttaatatccgtcaagagagttatctggtaagttcattatctgaaataacatatagattttatctaattaatctaaaatctgatcttgttcaatggagtgctagtacgggcgctgtaattaatcaaatggtaaatactgtattgattacagtgtatgaaaagttacaactggtcatagaaaatgattcacaatttacatgttcattggctgtggaatcagaacttccaataaaattacttaaagatagaaatgaattatttacaaaattcatcaacgagttaaaaaagaccagttcattcaagataagcaaacgcgataaggatacgctactaaaatattttacttaggactggagttagaatttatagacgactcatttcgtttatcattattactaccatcattattagtattcttcttgttatcttgttcagaaatatacagcaatgctatgcctaatactaaatacattatcatgcttgcaatggctctaacaacgacgaaccaaaatgaatttggtcgtagcttttgttcacaaaaatacataaagaaatgtctacataaatctatggcgccattggctacttgaaatagcgccagtcctcctacagattttaatatagctgtataacatgacatttattcatcatcaaaagagacagagtcaccatctgtcatatttagattttttttcatgtgttcaaagtatcctctactcatttcattataatagtttatcatacttagaattttaggacggatcaatgagtaagacttgactagatcgtcagtagtaatttgtgcatcgtctattctgcatccgcttcgtcgaataatgtatagcatcgctttgagattctccatagctatcaagtctttatacaatgacatggaaatatctgtgaatactttatacttctccaacatcgatgccttaacatcatcgcctactttagcattgaaaatacgttctattgtgtagatggatgtagcaagatttttaaacaacaatgccatcttacacgatgattgcctcaagtctccaatcgtttgtttagaacgattagctacagagttcaacgcttggctgactagcatattattatctttagaaattgtattcttcaatgaagcgtttatcatatctgtgatttcgttagtcatattacagtctgactgggttgtaatgttatccaacatatcacctatggatacggtacacgtaccagcatttgtaataatcctatctaagatgttgtatggcattgcgcagaaaatatcttctcctgtaatatctccactctcgataaatctactcagattattcttaaatgccttattctctggagaaaagatatcagtgtccatcatttcattaatagtatacgcagaaaagataccacgagtatcaattctatccaagatacttatcggttccgagtcacagataatggtttcctctccttcgggagatcctgcatagaaatatctaggacaatagtttctatactgtctgtaactctgataatctctaaagtcactaactgataccatgaaattgagaagatcaaacgctgaagtaatcaatttttctgcctcgtttttactacaactagttttcatcaatgtagtgacgatgtattgtttagttactcttggtctaatactgatgatagagatattattacttcccataatggatcttctagtagtcaccttaaagcccattgatgcaaatagcagatagataaagtcttggtatgactcctttctaatatagtacggactacctttgtcacccaactttatacccacataagccataacaacctctttaatagccgtttcatgaggtttatcagccatgagcctgagtagttggaagaatctcatgaatcccgtctcagaaagtcctatatgcatgatagatttatctttcctgggaaactctcgtatagtcatagatgaaatactcttcaaagtttctgaaataagattagtaacagtcttacctccgactactctgggtaacaaacatactctaataggtgttttctctgcggagataatatcagaaaggatagagcaataagtagtattattgtgattataaagaccgaatacataacaggtagaatttataaacatcatgtcctgaaggtttttagacttgtattcctcgtaatccataccgtcccaaaacatggatttggtaactttgatagccgtagatctttgttccttcgccaacaggttaaagaaattaataaagaatttgttgtttctatttatgtccacaaattgcacgtttggaagcgtaactgttacgttcactgcagcattttgaggatcgcgagtatgaagtacgatgttattgtttactggtatatctggaaagaaatctaccagtctaggaataagagattgatatcgcatagaaatagtaaagtttataatctcatcatcgaagagcattttgttaccattgtaataaatatccactctgtcatatgtataaatgaagtactgttcaaacatgatgagatgtttatatgttggcatagtagtgagatcgacgtttggtaatggcaatgtattaagattaactccataatgtctagcagcatctgcgatgttataagtgtcgtcaaagcggggtcgatcttgtgctgttatatattgtctaacacctataagattatcaaaatcttgtctgcttaatacaccgttaacaatttttgccttgaattcttttattggtgcattaataacatccttatagaggatgttaaacaaataagtgttatcaaagttaagatctggatatttcttttctgctagaacatccattgagtcggagccatctggtttaatataaccaccgataaatctagctctgtattctgtatccgtcaatctaatattaagaaggtgttgagtgaaaggtggaagatcgtaaaagctgtgagtattaatgataggattagtttccgaactaatgttaattggggtattaataatatctatatttccagcgttaagtgtaacattaaacagttttaattcacgtgacgtggtatcaattaaataattaatgcccaatttggatatagcagcctgaagctcatcttgtttagttacggatcctaatgagttattaagcaatatatcgaacggatgaacgaaggttgttttaagttggtcacatactttgtaatctagacatagatgcggaagaacggtagaaactatacgaaataaatattcagagtcctctaattgatcaagagtaactattgacttaataggcatcatttatttagtattaaatgacgaccgtaccagtgacggatatacaaaacgatttaattacagagttttcagaagataattatccatctaacaaaaattatgaaataactcttcgtcaaatgtctattctaactcacgttaacaacgtggtagatagagaacataatgccgccgtagtgtcatctccagaggaaatatcctcacaacttaatgaagatctatttccagatgatgattcaccggccactattatcgaacgagtacaacctcatactactattattgacgatactccacctcctacttttcgtagagagttattaatatcggaacaacgtcaacaacgagaaaaaagatttaatattacagtatcgaaaaatgctgaagcaataatggaatctagatctatgataacttctatgccaacacaaacaccatccttgggagtagtttatgataaagataaaagaattcagatgttagaggatgaagtggttaatcttagaaatcaacgatctaatacaaaatcatctgataatttagataattttaccaaaatactatttggtaagactccgtataaatcaacagaagttaataagcgtatagccatcgttaattatgcaaatttgaacgggtcccccttatcagttgaggacttggatgtttgttcggaggatgaaatagatagaatctataaaacgattaaacaatatcacgaaagtagaaaacgaaaaattatcgtcactaacgtgattattattgtcataaacattatcgagcaggcattgctaaaactcggatttgaagaaatcaaaggactgagtaccgatatcacttcagaaattatcgatgtggagatcggagatgactgcgatgctgtagcatctaaactaggaatcggtaacagtccggttcttaatattgtattgtttatactcaagatattcgttaaacgaattaaaattatttaatttaatacattcccatatccagacaacaatcgtctggattaatctgttcctgtcgtctcataccggacgacatattaatctttttattagtaggcatctttttagatggtttctttttcccagcattaactgagtcgatacctagaagatcgtgattgatctctccgaccattccacgaacttctaattggccgtctctgacggtaccataaactattttaccagcattagtaacagcttggacaatctgaccatccattgcgttgaatgatgtagttgctgttgttctacgtttaggagcaccagaagtatttttggagcccttggaggctgatgtagaagaagacgaggattttgatttacatgtaatacattttgtactctttgattttgtatcacatgcgccggcagtcacatttgtttgagaattaagattattgttgcctcctttgacggctgcatctccaccgatttgcgctagtagatttttaagctgtggtgtaatcttattaactgtttcgatataatcatcgtaactgcttctaacggctaaattttttttatccgccatttagaagctaaaaatatttttatttatgcagaagatttaactagattatacaatgaactaatatgatccttttccagattatttacaaacttggtattttttggttctggaggaggcgaatttaaattcggacttggattcggattttgtgagttcttgatcttattatacatcgagtataggatggcgacggtaactgctacgcaaataccgatcaacaaaagaataccaatcatttattgacaataacttcactattgatcaagtatgcaatatatcatcttttcactaaataagtagtaataatgattcaacaatgtcgagatatatggacgataataatttagttcatggaaatatcgctatgattggtatgaatgactccgctaactctgtggggtgcgcagtgctttccccacatagaataaattagcattccgactgtgataataataccaagtataaacgccataatactcaatactttccatgtacgagtgggactggtagacttactaaagtcaataaaggcgaagatacacgaaagaatcaaaagaatgattccagcgattagcacgccggaaaaataatttccaatcataagcatcatgtccatttaactaataaaaattttaaatcgccgaatgaacaaagtggaatataaaccatataaaaacaatagtttgtactgcaaaaataatatctatttttgttttcgaagatatggtaaaattaaatagtagtacacagcatgttataactaacagcagcaacggctcgtaattacttatcatttactagacgaaaaggtggtgggatattttcttgctcaaataatacgaatatatcacccatccattttatgcgatgtttatatactctaatctttaatagatctatagacgacgggtttaccaacaatatagattttatcgattcatctaatttaaacccttccttaaacgtgaatgatctattatctggcataacgatgactctacctgatgaatcggacaatgtactgggccatgtagaataaattatcaacgaattatcgtctacgaacatttatatcatttgttttaattttaggacgcgaataaatggatataaaatagaaaataacagatattacaaccaatgttatggccgcgcccaaccaggtaggcagttttattttatcttttactacaggttctcctggatgtacgtcaccaacggcggacgtagttctagtacaattagacgtaagttctgcttgggaattttttaacgctaaagagttaacgttaatcgtgcacccaacgtatttacatctagttctttgaacatcttgattataatataaccattttctatctctagattcgtcggtgcactcatgtaaccaacataccctaggtcctaaatatttatctccggaattagattttggataattcgcgcaccaacaatttctatttcctttatgatcgttacaaaagacgtataatgccgtatccccaaaagtaaaataatcaggacgaataattctaataaactcagaacaatatctcgcatccatatgtttggagcaaatatcggaataagtagacatagccggtttccgttttgcacgtaaccattctaaacaattggggtttccaggatcgtttctacaaaatccagtcatgaaatcatcacaatgttctgtcttgtaattattattaaatatttttggacagtgtttggtatttgtcttagaacaacattttgccacgctatcactatcgcccaggagataatccttttttataaaatgacatcgttgcccggatgctatataatcagtggcgtgttttaaatccttaatatattcaggagttacctcgttctgataatagattaatgatccaggacgaaatttgaaagaactacatggttctccatgaattaatacatattgtttagcaaattcaggaactataaaactactacaatgatctatcgacataccatctatcaaacaaaacttgggtttaatttctcccggagatgtttcataatagtacgtataactttcttctgcaaacttaacagctctattatattcaggataattaaaacctaattccatatatttgtctcgtatatctgctattcctggtgctattttaattctattaagagtaacggctgcccccattcttaataatcgtcagtatttaaactgttaaatgttggtatatcaacatctaccttatttcccgcagtataaggtttgttgcaggtatactgttcaggaatggttacatttatacttcttctatagtcctgtctttcgatgttcatcacatatgcaaagaacagaataaacaaaataatgtaagaaataatattaaatatctgtgaattcgtaaatacattgattgccataataattacagcagctacaatacatacaatagacattcccacagtgttgccattacctccacgatacatttgagttactaagcaataggtaataactaagctagtaagaggcaatagaaaagatgagataaatatcatcaatatagagattagaggagggctatatagagccaagacgaacaaaatcaaaccgagtaacgttctaacatcattatttttgaagattcccaaataatcattcattcctccataatcgttttgcattatacctccatctttaggcataaacgattgctgctgttcctctgtaaataaatctttatcaagcactccagcacccgcagagaagtcgtcaagcatattgtaatatcttaaataactcatttatatattaaaaaatgtcactattaaagatggagtataatctttatgccgaactaaaaaaaatgacttgtggtcaacccctaagtctttttaacgaagacggggatttcgtagaagttgaaccgggatcatcctttaagtttctgatacctaagggattttacgcctctccttccgtaaagacgagtctagtattcgagacattaacaacgaccgataataaaatcactagtatcaatccaacaaatgcgccaaagttatatcctcttcaacgcaaagtcgtatctgaagtagtttctaatatgaggaaaatgatcgaatcaaaacgtcctctatacattactcttcacttggcgtgtggatttggtaagactattaccacgtgttatcttatggctacacacggtagaaaaaccgtcatttgcgtacccaataaaatgttaatacatcaatggaagacacaggtagaggcagtcggattggaacataagatatctatagatggagtaagtagtctattaaaggaactaaagactcaaagtccggatgtattaatagtagtcagtagacatctgacaaacgatgccttttgtaaatatatcaataagcattatgatttgttcatcttggatgaatcacatacgtataatctgatgaacaatacagcagttacaagatttttagcgtattatcctccgatgatgtgttattttttaactgctacacctagaccagctaaccgaatttattgtaacagtattattaatattgccaagttatccgatctaaaaaaaactatctatgcggtagatagtttttttgagccatattccacagacaatattagacatatggtaaaacgactagatggaccatctaataaatatcatatatatactgagaagttattatctgtagacgagcctagaaatcaacttattcttgataccctggtagaagaattcaagtcaggaactattaatcgaattttagttattactaaactacgtgaacatatggtattcttctacaaacgattattagattttttcggatcagaggttgtatttataggagacgcccaaaatagacgtactccagatatggtcaaatcaatcaaggaactaaatagatttatattcgtatccaccttattttattccggtactggtttagatattcctagtttggattcgttgttcatttgctcggcagtaatcaacaatatgcaaatagagcaattactagggagggtatgtcgagaaacagaactattagataggacggtatatgtatttcctaacacatccatcaaagaaataaagtacatgataggaaatttcatgcaacgaattattagtctgtctgtagataaactaggatttaaacaaaaaagttatcggaaacatcaagaatccgatcccacttctgtatgtacaacatcctccagagaagaacgtgtattaaatagaatatttaactcgcaaaatcgttaagaagtttaagcgacgatccgcatgctgcgcaggccagtgtattacccctcatagtattaatataatccaatgatacttttgtgatgtcggaaatcttaaccaatttagactgacaggcagaacacgtcatgcaatcatcatcgtcatcgataactgtagtcttgggcttctttttgcggctcttcattccggaacgcacattggtgctatccatttaggtagtaaaaaataagtcagaatatgccctatagcacgatcgtgcaaaacctggtatatcgtctctatctttatcacaatatagtgtatcgacatttttattattattgacctcgtttatcttggaacatggaatgggaacatttttgttatcaacggccatctttgccttaattccagatgttgtaaaattataactaaacagtctatcatcgacacaaatgaaattcttgtttagacgtttgtagtttacgtatgcggctcgttcgcgtctcattttttcagatattgcaggtactataatattaaaaataagaatgaaataacataggattaaaaataaagttatcatgacttctagcgctgatttaactaacttaaaagaattacttagtctgtacaaaagtttgaaattttcagattctgcggctatagaaaagtataattctttggtagaatggggaacatctacttactggaaaataggcgtgcaaaaggtagctaatgtcgagacgtcaatatctgattattatgatgaggtaaaaaataaaccgtttaatattgatccgggatattacattttcttaccggtatattttggaagcgtctttatttattcgaagggtaaaaatatggtagaacttggatctggaaactcttttcaaataccagatgatatgcgaagtgcgtgtaacaaagtattagacagcgataacggaatagactttctgagatttgttttgttaaacaatagatggataatggaagatgctatatcaaaatatcagtctccagttaatatatttaaactagctagtgagtacggattaaacatacccaaatatttagaaattgaaatagaggaagacacattatttgacgacgagttatactctattatagaacgctctttcgatgataaatttccaaaaatatccatatcgtatattaagttgggagaacttagacggcaagttgtagactttttcaaattctcgttcatgtatattgagtccatcaaggtagatcgtataggagataatatttttattcctagcgttataacaaaatcaggaaaaaagatattagtaaaagatgtagaccatttaatacgatccaaggttagagaacatacatttgtaaaagtaaaaaagaaaaacacattttccattttatacgactatgatggaaacggaacagaaactagaggagaagtaataaaacgaattatagacactataggacgagactattatgttaacggaaagtatttctctaaggttggtagtgcaggcttaaagcaattgactaataaattagatattaatgagtgcgcaactgtcgatgagttagttgatgagattaataaatccggaactgtaaaacgaaaaataaaaaaccaatcagcatttgatttaagcagagaatgtttgggatatccagaagcggattttataacgttagttaataacatgcggttcaaaatagaaaattgtaaggttgtaaatttcaatattgaaaatactaattgtttaaataacccgagtattgaaactatatatggaaactttaaccagttcgtctcaatctttaatatcgtcaccgatgtcaaaaaaagattattcgagtgaaataatatgcgcctttgatataggtgcaaaaaatcctgccagaactgttttagaagtcaaggataactccgttagggtattggatatatcaaaattagactggagttctgattgggaaaggcgcatagctaaagatttgtcacaatatgaatacactacagttcttctagaacgtcagcctagaaggtcgccgtacgtcaaatttatctattttattaaaggctttttatatcatacatcggctgccaaagttatttgcgtctcgcctgtcatgtctggtaattcatatagagatcgaaaaaagagatcggtcgaagcatttcttgattggatggacacattcggattgcgagactccgttccggatagacgcaaattagacgatgtagcggatagtttcaatttggctatgagatacgtattagataaatggaatactaattatacaccttataataggtgtaaatctagaaattacataaaaaaaatgtaataacgttagtaacgccattatggataatctatttacctttctacatgaaatagaagatagatatgccagaactatttttaactttcatctaataagttgcgatgaaataggagatatatatggtcttatgaaagaacgcatttcctcagaggatatgtttgataatatagtgtataataaagatatacatcatgccattaagaaactagtgtattgcgacatccaacttactaaacacattattaatcagaatacgtatccggtatttaacgattcttcacaagtgaaatgttgtcattatttcgacataaactcagataatagcaatattagctctcgtacagtagagatatttgagagggaaaagtcatctcttgtatcatatattaaaactaccaataagaagagaaaggtcaattacggcgaaataaagaaaactgttcatggaggcactaatgcaaattacttttccggtaaaaagtctgacgagtatctgagtactacagttagatccaacattaatcaaccttggatcaaaaccatctctaagaggatgagagttgatatcattaatcactctatagtaacgcgtggaaaaagctctatattacaaactatagaaattatttttactaatagaacatgtgtgaaaatattcaaggattctactatgcacattattctatccaaggacaaggatgaaaaggggtgtatacacatgattgacaaattattctatgtctattataatttatttctgttgttcgaggatatcatccaaaacgagtactttaaagaagtagctaatgttgtaaaccacgtacttacggctacggcattagatgagaaattattcctaattaagaaaatggctgaacacgatgtttatggagttagcaatttcaaaatagggatgtttaacctgacatttattaagtcgttggatcataccgttttcccctctctgttagatgaggatagcaaaataaagttttttaaggggaaaaagctcaatattgtagcattacgatctctggaggattgtataaattacgtgactaaatccgagaatatgatagaaatgatgaaggaaagatcgactattttaaatagcatagatatagaaacggaatcggtagatcgtctaaaagaattgcttctaaaatgaaaaaaaacactgattcagaaatggatcaacgactcggatataagtttttggtgcctgatcctaaagccggagttttttatagaccgttacatttccaatatgtatcgtattctaattttatattgcatcgattgcatgaaatcttgaccgtcaagcggccactcttatcgtttaagaataatacagaacgaattatgatagaaattagcaatgttaaagtgactcctccagattactcacctataatcgcgagtattaaaggtaagagttatgacgcattagccacgttcactgtaaatatctttaaagaggtaatgaccaaagagggtatatccatcactaaaataagtagttatgagggaaaagattctcatttgataaaaattccgctactaataggatacgggaataaaaatccacttgatacagccaagtatcttgttcctaatgtcataggtggagtctttatcaataaacaatctgtcgaaaaagtaggaattaatctagtagaaaagattacaacatggccaaaatttagggttgttaagccaaactcattcactttctcgttttcctccgtatcccctcctaatgtattaccgacaagatatcgccattacaagatatctctggatatatcacaattggaagcgtcgaatatatcatcgacaaagacatttataacggtcaatattgttttgctgtctcaatatttatctagagtgagtctagaattcattagacgtagcttatcatacgatatgcctccagaagttgtctatctagtaaacgcgataatagatagtgctaaacgaattactgaatctattactgactttaatattgatacatacattaatgacctggtggaagctgaacacattaaacaaaaatctcagttaacgatcaacgagttcaaatatgaaatgctgcataactttttacctcatatgaactatacacccgatcaactaaagggattttatatgatatctttactaagaaagtttctctactgtatctaccacacttctagatatccagatagagattcgatggtttgtcatcgtatactaacatacggcaaatattttgagacgttggcacatgatgaattagagaattacataggcaacatccgaaacgatatcatgaacaatcacaagaacagaggcacttacgcggtaaacattcatgtactaacaactcctggacttaatcatgcattttctagtctattgagtggaaagttcaaaaagtcagacggtagttatcgaacacatcctcactattcatggatgcagaatatttctattcctaggagtgttggattttatccggatcaagtaaagatttcaaagatgttttctgtcagaaaataccatccaagtcaatatctttacttttgttcatcagacgttccggaaagaggtcctcaggtaggtttagtatctcaattgtctgtcttgagttccattacaaatatactaacgtctgagtatttggatttggaaaagaaaatttgtgagtatatcagatcatattataaagatgatataagttactttgaaacaggatttccaatcactatagaaaatgctctagtcgcatctcttaatccaaatatgatatgtgattttgtaactgactttagacgtagaaaacggatgggattcttcggtaacttggaggtaggtattactttagttagggatcacatgaatgaaattcgcattaatattggagcgggaagattagtcagaccattcttggttgtggataacggagagctcatgatggatgtgtgtccggagttagaaagcagattagacgacatgacattctctgacattcagaaagagtttccgcatgtcatcgaaatggtagatatagaacaatttacttttagtaacgtatgtgaatcggttcaaaaatttagaatgatgtcaaaggatgaaagaaagcaatacgatttatgtgactttcctgccgaatttagagatggatatgtggcatcttcattagtgggaatcaatcacaattctggacccagagctattcttggatgtgctcaagctaaacaagctatctcttgtctgagctcggatatacgaaataaaatagacaatggaattcatttgatgtatccagagaggccaatcgtgattagtaaggctttagaaacttcaaagattgcggctaattgcttcggccaacatgttactatagcattaatgtcgtacaaaggtatcaatcaagaggatggaattatcatcaaaaaacaatttattcagagaggcggtctcgatattgttacagccaagaaacatcaagtagaaattccattggaaaactttaataacaaagaaagagataggtctaacgcctattcaaaattagaaagtaatggattagttagactgaatgctttcttggaatccggagacgctatggcacgaaatatctcatcaagaactcttgaagatgattttgctagagataatcagattagcttcgatgtttccgagaaatataccgatatgtacaaatctcgcgttgaacgagtacaagtagaacttactgacaaagttaaggtacgagtattaaccatgaaagaaagaagacccattctaggagacaaatttaccactagaacgagtcaaaagggaacagtcgcgtatgtcgcggatgaaacggaacttccatacgacgaaaatggtatcacaccagatgtcattattaattctacatccatcttctctagaaaaactatatctatgttgatagaggttattttaacagccgcatattctgctaagccgtacaacaataagggagaaaaccgacctgtctgttttcctagtagtaacgaaacatccatcgatacatatatgcaattcgctaaacaatgttatgagcattcaaatccgaaattgtctgatgaagaattatcggataaaatcttttgtgaaaagattctctatgatcctgaaacggataagccttatgcatccaaagtattttttggaccaatttattacttgcgtctgagacatttaactcaggacaaggcaaccgttagatgtagaggtaaaaagacgaagctcattagacaggcgaatgagggacgaaaacgtggaggaggtatcaagttcggagaaatggagagagactgtttaatagcgcatggtgcagccaatactattacagaagttttgaaagattcggaagaagattatcaagatgtgtatgtttgtgaaaattgtggagacatagcagcacaaatcaagggtattaatacatgtcttagatgttcaaaacttaatctctctcctctcttaacaaaaattgataccacacacgtatctaaagtatttcttactcaaatgaacgccagaggcgtaaaagtcaaattagatttcgaacgaagacctccttcgttttataaaccattagataaagttgatctcaaaccgtcttttctggtctaatattgtttagtagatacttatcaacatcatcaagattatcaagattatcaagattatcaagataagctaattcactaaacacattatcgatttcggtatcgttactcgcagaataaagttcgttatgatcctgatattcggaaatctgtggagtttcaggttttggtggatgtgtaacagctacttgagataccgaagtctgatattcagaaagctgtggatgttctggttcggcatccaccgatggtgttacaccactactaattggttcagtaacgtctgtggacgatggaggcaccacttctacaggttctggttctttatcctcagtcatcaacggagctacttcaatgcgaggaaatgtataatttggtaatggtttctcatgtggatctgaagaagaggtaagatatctactagaaagataccgatcacgttctagttctcttttgtagaacttaactttttctttctcagcatctagttgatattccaacctcttcacgttactacgttcagatttcaattcacgttcgcatgggttacctccgcagtttttacgagcgatttcacgttcagccttcatgcgtctctccctctctctatcgagtttatcagagcagtctttctgaaggcgatcgaactccataaatttctccaacgctttgattgtttccatagatttccgaagttcagcttttaggactgtgattctttttctttcgaattcacagctggatgtacaaccgtttccattaccgccatctctaagtttcttttctagatcggcaacatttcatccccatgccttttacattcctcgagtctactgtcgtcgaaatatcgttccagctccttttcgacatcaataactttagcacgttgtctctcaagctctcttttgtagttatctgattccctggcacgtttaagatcttcatgcaattgagtcagctcttaacacaatctcttgcttcttcgtcatagtacgcgcaatcactgtgagatccattgttaccacgtctacactcggcgagctcgcgtttaagagattcaatttcccgtttgtattggtccatgtttccattgctaccaccattagatttacaggctgctagttgtcgttcgagatcagaaatacgggttttcttggaattgatttcgtcgatgtacttggcatcgaaacacttattaagttctttttccaattctacgattttatttctttcgcgagtcaattccctcctgtagtaactatctgttttgtcagattcacgctctctacgtagactttcttgcaagttactaatttgttccctagcacgtccgagtttagttttatatgctgaatagagttctgattcatcctttgagcagatctctagcgatcgtttaagattcctgattctagtctttagcctatttacctcctcagaagatgttccgttaccgttgcgtttacactcgttaagctgtctatcaagatccatgattctatctctaagacgttgcatctctctttccatatcagcattgctttcattattacgtctgcagtcactcaactgtctttcaatatctgagattctatctctaagacgtcgcatctctctctgtttcggcattggtttcattattacgtctacagtcgttcaactgtctttcaagatctgatattctagattggagtctgctaatctctgtagcattttcacggcattcactcagttgtctttcaagatctgaaattttagattggagtctgctaatctctgtaagatttcctcctccgctctcgatgcagtcggtcaacttattctctagttctctaatacgcgaacgcagtgcatcaacttcttgcgtgtcttcctggttgcgtgtacattcatcgagtctagattcgagatctctaacgcgtcgtcgttcttcctcaagttctctgcgtactacagaaagcgtgtccctatcttgttgatatttagcaatttctgattctagagtactgattttgcttacgtagttactaatatttgtcttggccttatcaagatcctccttgtatttgtcgcattccttgatatccctacgaagtctggacagttcccattcgacattacgacgtttatcgatttcagctcggagatcgtcatcgcgttgttttagccacatacgactgagttcaagttctcgttgacaagatccatctacttttccattcctaatagtatccagttccttttctagttctgaacgcatttctcgttccctatcaagcgattctctcaattctcggatagtcttcttatcaatttctaataaatctgaaccatcatctgtcccattttgaatatccctgtgttctttgatctcttttgtaagtcggtcgattctttcggttttataaacagaatccctttccaaagtcctaatcttactgagtttatcactaagttctgcattcaattcggtgagttttctcttggcttcttccaactctgttttaaactctccactatttccgcattcttcctcgcatttatctaaccattcaattagtttattaataactagttggtaatcagcgattcctatagccgttcttgtaattgtgggaacataattaggatcttctaatggattgtatggcttgatagcatcatctttatcattattagggggatggacaaccttaattggttggtcctcatctcctccagtagcgtgtggttcttcaatagccgtgttagtaataggcttaggcaaatgcttgtcgtacgcgggcacttcctcatccatcaagtatttataatcgggttctacgtctgaatattcttttctaagagacgcaacttctggagttagtagaagaactctgtttctatatctatcaacgctggaatcaatactcaagttaaggatagcgaatacctcatcgtcatcatccgtatcctctgaaacgccatcatatgacatttcatgaagtctaacgtattgataaacagaatcagatttagtattaaacagatccttaacctttttagtaaatgcatatgtatattttagatctccagatttcataatatggtcgcatgccttaaatgtcagtgcttccataatatagtctggaacactaattggtgatgaaaaagataccggaccatatgctacgttgataaataactctgagccactaactagataatgattaatgttaaggaagaggaaatattcagtgtataggtatgtcttggcgtcatatcttgtactaaacacgctaaacagtttgttaatgtgatcaatttccaatagattaattagagcagcaggaataccaacaaacatattaccacatccgtattttctatgaatatcacatatcatgttaaaaaatcttgatagaagagcgaatatctcgtctgacttaatgagtcgtagttcagcagcaacataagtcataactgtaaatagaacatactttcctgtagtgttgattctagactccacatcaacaccattattaaaaatagttttatatacatctttaatctgctctccgttaatcgtcgaacgttctagtatacggaaacactttgatttcttatctgtagttaatgacttagtgatatcacgaagaatattacgaattacatttcttgtttttcttgagagacctgattcagaactcaactcatcgttccatagtttttttacctcagtggcgaaatctttggagtgcttggtacatttttcaataaggttcgtgacctccatttattataaaaaaattttattcaaaacttaactacaatcgggtaattataaaatcgtagatctcccatgtggtggaatactaccatctatcgcatgtggatggacagtaggtaatggccatgggaacagtaatgtttgcatatttatctttcttgccagtattactgcatattgtcccaatgtttcgatgtgatgttctaacctatcaactgccgctgtatcacaacaatagtgtccgatgaaattaagattatgatccaatgtgtttaatatatgattatcaagtcttatacgatccgcgtcttttttgacaggatcaggttcttctacaggaagaagtttcggcctcttatgatattcatgtctgggaaacggtggtctagggtgaggctccggtatcggagtgggttttggattataatcatcatcgtctatgacatcatcttcgacttcgatatttattttgctatcttgatgatgtcctgtatcagttgcattttcagcactcgactgaatattagcgcattcattgtttattattaccatatttctaaacccaaaatgtatatgttgaacatcagtactatcgttgatgagtcttatagcatgaattcgcttatcgttatcgggtttagcttctgtcaccttagcaattccttttttattaaactctacataatcatatccatttctattgtttgttctaatataaacgagtatagcatcattgctaaatttttcaatagtatcgaaaacagaatatcctaaaccatataatatatattcaggaacactcaaactaaatgtccaggattctcctaaatacgtaaactttaatagtgcgaaatcattcaaaaatctaccacttatagatagatagtacataaatgcgtatagtagtctacctatctctttattatgaaaaccggcattacgatcatatatgtcgtgatatacctgtgatccgtttacgttaaaccataaatacatgggtgatcctataaacatgaatttatttctaattctcagagctatagttaattgaccgtgtaatatttgcttacatgcatacttgatacgctcattaataagatttttatcattgctcgttatctcagaatcgtatatataaggagtaccatcgtgattcttaccagatattatacaaaatactatatataaaatatattgaccaacgttagtaatcatataaatgtttaacgttttaaattttgtattcaatgatccattatcatacgctagcatggtcttatgatattcattctttaaaatataatattgtgttagccattgcattggggctcctaatggagattttttattctcatccattttaggataggctttcataaagtccctaataacttcgtgaataatgtttctatgttttctactgatgcatgtatttgcttcgatttttttatcccatgtttcatctatcatagatttaaacgcagtaatgctcgcaacattaacatcttgaaccgttggtacaattccgttccataaatttataatgttcgccatttatataactcattttttgaatatacttttaattaacaaaagagttaagttactcatatggacgccgtccagtctgaacatcaatctttttagccagagatatcatagccgctcttagagtttcagcgtgattttccaacctaaatagaacttcatcgttgcgtttacaacacttttctatttgttcaaactttgttgttacattagtaatctttttttccaaattagttagccgttgtttgagagtttcctcattgtcgtcttcatcggctttaacaattgcttcgcgtttagcctctggctttttagcagcctttgtagaaaaaaattcagttgctggaattgcaagatcgtcatctccggggaaaagagttccgtccatttaaagtacagattttagaaactgacactctgcgttatttatatttggtacaacacatggattataaatattgatgttaataacatcagaaaatgtaaagtctatacattgttgcatcgtgttaaattttctaatggatctagtattattgggtccaacttctgcctgaaatccaaatatggaagcggatacaaaaccgtttcctggataaaccacacatctccacttttgctttacatcagaaattgtgtcattgacatcttgaactctcctatctaatgccggtgttccacctatagattttgaatattcgaatgctgcatgagtagcattaaattccttaatattgccataattttcatatattgagtaaccctggataaaaagtaaacacaccgcagccgtcgctaccacaataaaaaaaattgatagagagttcatttataatctattagaagctgacaaaatttttttacacgcatcagacaatgctttaataaatagttcaacatctacttttgtcatatcgaaccgatggtatgattctaacctagaattacatccgaaaaagttgactatgttcatagtcattaagtcattaacaaacaacattccagactctggattataagacgatactgtttcgtcacaattacctaccttaatcatgtgattatgaatattggctattagagcaccttctaagaaatctataatatctttgaaacacgatttaaaatcaaaccacgaatatacttctacgaagaaagttagtttacccataggagaaataactataaatggagatctaaatacaaaatccggatctatgatagttttaacattattatattctctattaaatacctccacatctaaaaatgttaattttgaaactatgtcttcgtttattaccgtacctgaactaaacgctataagctctattgtttgagaactctttaaacgatattcttgaaatacatgtaacaaagtttcctttaactcggtcggtttatctaccatagttacagaatttgtatccttatctataatataataatcaaaatcgtataaagttatataattatcgcgttcagattgtgatcttttcaaatagactaaaaaccccatttctctagtaagtatcttatgtatatgtttgtaaaatatcttcatggtgggaatatgctctaccgcagttagccattcctcattgacagcggtagatgtattagacaaaactattccaatgtttaacaagggccattttacgagattattaaatccttgtttgataaatgtagccaatgagggttcgagttcaacgacgattgaattctcttcccgcggatgctgcatgatgaacgacgggatgttgttcgattgatttggaattctttttcgactttttgtttatattaaatattttaaaatttatagctgatagcaattcatgtactacggataatgtagacgcgtattgcgcatcgatatctttattattagataaatttatcaataaatgtgagaagtttgcctcgttaaggtcttccatttaaatattatataaacatttgtgtttgtatcttattcgtcttttatggaatagttttttactagtaaagctgcaattacacactttgtccgtaaaacataaatataaacaccagcttttatcaatcgttccaaaaagtcgacggcggacatttttaacatggcatctattttaaatacacttaggtttttggaaaaaacatcattttataattgtaacgattcaataactaaagaaaagattaagattaaacataagggaatgtcatttgtattttataagccaaagcattctaccgttgttaaatacttgtctggaggaggtatatatcatgatgatttggttgtattggggaaggtaacaattaatgatctaaagatgatgctattttacatggatttatcatatcatggagtgacaagtagtggagcaatttacaaattgggatcgtctatcgatagactttctctaaataggactattgttacaaaagttaataattatgatgatacattttttgacgacgatgattgatcgctattgcacaattttgtttttttactttctaatatagcgtttagattctttttcatgtgcgaatattgatttactaaaatatcgatgtttaacttttgttctatgacgtccttatcagcggtatcggtacatatacgtaattcaccttcacaaaatacggagtcttcgataataatagccaatcgattattggatctagcggtctgtatcatattcaacatgtttaatatatcctttcgtttcccctttacaggcatcgatcgtagcatattttccgcgtctgagatggaaatgttaaaactacaaaaatgcgtaatgttagcccgtcctaatattggtacgtgtctataagtttggcatagtagaataatagacgtgtttaaatgccttccaaagtttaagaattctattagagtattgcattttgatagtttatcgcctacatcatcaaaaataagtaaaaagtgtgctgattttttatgattttgtgcgacagcaatacatttttctatgttacttttagttcgtatcagattatattctagagattcctgactactaacgaaattaatatgatttggccaaatgtatccatcataatctggattataaacgggtgtaaacaagaatatatgtttatattttttaactagtgtagaaaacagagatagtaaatagatagtttttccagatccagatcctcccgttaaaaccattctaaacggcatttttaataaattttctcttgaaaattgtttttcttggaaacaattcataattatatttacagttactaaattaatttgataataaatcaaaatatggaaaactaaggtcgttagtagggaggagaacaaagaaggcatatcgtgatataaataacatttattatcatgatgacaccagaaaacgacgaagagcagacatctgtgttctccgctactgtttacggagacaaaattcagggaaagaataaacgcaaacgcgtgattggtctatgtattagaatatctatggttatttcactactatctatgattaccatgtccgcgtttctcatagtgcgcctaaatcaatgcatgtctgctaacgaggctgctattactgacgccgctgttgccgttgctgctgcatcatctactcatagaaaggttgcgtctagcactacgcaatatgatcacaaagaaagctgtaatggtttatattaccagggttcttgttatatattacattcagactaccagttattctcggatgctaaagcaaattgcactgcggaatcatcaacactacccaataaatccgatgtcttgattacctggctcattgattatgttgaggatacatggggatctgatggtaatccaattacaaaaactacatccgattatcaagattctgatatatcacaagaagttagaaagtatttttgtgttaaaacaatgaactaatatttatttttgtacattaataaatgaaatcgcttaatagacaaactgtaagtaggtttaagaagttgtcggtgccggccgctataatgatgatactctcaaccattattagtggcataggaacatttctgcattacaaagaagaactgatgcctagtgcttgcgccaatggatggatacaatacgataaacattgttatctagataccaacattaaaatgtctacagataatgcggtttatcagtgtcgtaaattacgagctagattgcctagacctgatactagacatctgagagtattgtttagtattttttataaagattattgggtaagtttaaaaaagaccaataataaatggttagatattaataatgataaagatatagatattagtaaattaacaaattttaaacaactaaacagtacgacggatgctgaagcgtgttatatatacaagtctggaaaactggttgaaacagtatgtaaaagtactcaatctgtactatgtgttaaaaaattctacaagtgacaacaaaaaatgaattaataataagtcgttaacgtacgccgccatggacgccgcgtttgttattactccaatgggtgttgactataacagatacattgtatgatgatctcgatatctcaatcatggactttataggaccatacattataggtaacataaaaactgtccaaatagatgtacgggatataaaatattccgacatgcaaaaatgctactttagctataagggtaaaatagttcctcaggattctaatgatttggctagattcaacatttatagcatttgtgccgcatacagatcaaaaaataccatcatcatagcatgcgactatgatatcatgttagatatagaagataaacatcagccattttatctattcccatctattgatgtttttaacgctacaatcatagaagcgtataacctgtatacagctggagattatcatctaatcatcaatccttcagataatctgaaaatgaaattgtcgtttaattcttcattctgcatatcagacggcaatggatggatcataattgatgggaaatgcaatagtaattttttatcataaaagttgtaaagtaaataataaaacaataaatattgaactagtagtacgtatattgagcaatcagaaatgatgctggtacctcttatcacggtgaccgtagttgcgggaacaatattagtatgttatatattatatatttgtaggaaaaagatacgtactgtctataatgacaataaaattatcatgacaaaattaaaaaagataaagagttctaattccagcaaatctagtaaatcaactgatagcgaatcagactgggaggatcactgtagtgctatggaacaaaacaatgacgtagataatatttctaggaatgagatattggacgatgatagcttcgctggtagtttaatatgggataacgaatccaatgttatggcgcctagcacagaacacatttacgatagtgttgctggaagcacgctgctaataaataatgatcgtaatgaacagactatttatcagaacactacagtagtaattaatgaaacggagactgttaaagtacttaatgaagataccaaacagaatcctaactattcatccaatcctttcgtaaattataataaaaccagtatttgtagcaagtcaaatccgtttattacagaacttaacaataaatttagtgagaataatccgtttagacgagcacatagcgatgattatcttaataagcaagaacaagatcatgaacacgatgatatagaatcatcggtcgtatcattggtgtgattagtttcctttttataaaattgaagtaatatttagtattattgctgccgtcacgttgtacaaatggagatattccctgtattcggcatttctaaaattagcaattttattgctaataatgactgtagatattatatagatacagaacatcaaaaaattatatctgatgagatcaatagacagatggatgaaacggtacttcttaccaacatcttaagcgtagaagttgtaaatgacaatgagatgtaccatcttattcctcatagattatcgacgattatactctgtattagttctgtcggaggatgtgttatctctatagataatgacgtcaatggcaaaaatattctaacctttcccattgatcatgctgtaatcatatccccactgagtaaatgtgtcgtagttagcaagggccctacaaccatactggttgctaaagcggatatacccagcaaacgattggtaacatcgtttacaaacgacatactgtatgtaaacaatctatcactgattaattatttgccgttgtctgtattcattattagacgagtcaccgactatttggatagacacatatgcgatcagatatttgctaataataagtggtattcccttataaccatcgacgataagcaatatcctattccatcaaattgtataggtatgtcttctgccaagtacataaattctagcatcgagcaagatactttaatacatgtttgtaacctcgagcatccattcgacttagtatacaaaaaaatgcagtcgtacaattctgtacctatcaaggaacaaatattgtacggtagaattgataatataaatatgagcattagtatttctgtggattaatagatttctagtatggggatcattaatcatctctaatctctaaatacctcataaaacgaaaaaaaagctattatcaaatactgtacggaatagattcattctcttctctttttatgaaactctgttgtatatctactgataaaactggaagcaaaaaatctgataaaaagaataagatcaagatcaaggattatatggaacacgattattataaaataacaatagttcctggttcctcttccacgtctactagctcgtggtattatacacatgcctagtaatagtctctttgcgttgatggaaagcagactagaaataacaggctaaaatgttcagacaccataatagttcccaacccagataataacagagtaccatcaacacattcctttaaactcaatcccaaacccaaaaccgttaaaatgtatccggccaattgatagtagataatgaggtgtacagcgcatgataatttacacagtaaccaaaatgaaaatactttagtaattataagaaatatagatggtaacgtcatcatcaacaatccaataatatgccggagagtaaacattgacggataaaacaaaaatgctccgcataactctatcatggcaataacacaaccaaatacttgtaagattcctaaattagtagaaaatacaacggatatcgatgtataagtgatctcgagaaataataagaataaagtaatgcccgtaaagataaacatcaacattgtttggtaatcattaaaccaattagtatgacgttgaactaatttcacagtaaattttattccagtattatccccgcatgtataagtacctggtaagatatctttatattccataatcaatgagacatcactatctgataacgaatgaagtctagcactagtatgccatttacttaatattgtcgtcttggaagttttattataagttaaaatatcatggttatccaatttccatctaatatactttgtcggattatctatagtacacggaataatgatggtatcattacatgctgtatactctatggtctttgtagttgttataacaaccaacgtatagaggtatatcaacgatattctaactcttgacattttttatttatttaaaatgatacctttgttatttattttattctattttgctaacggtattgaatggcataagtttgaaacgagtgaagaaataatttctacttacttattagacgacgtattatacacgggtgttaatggggcggtatacacattttcaaataataaactaaacaaaactggtttaactaataataattatataacaacatctataaaagtagaggatgcggataaggatacattagtatgcggaaccaataacggaaatcccaaatgttggaaaatagacggttcagacgacccaaaacatagaggtagaggatacgctccttatcaaaatagcaaagtaacgataatcagtcacaacggatgtgtactatctgacataaacatatcaaaagaaggaattaaacgatggagaagatttgacggaccatgtggttatgatttattcacggcggataacgtaattccaaaagatggtttacgaggagcattcgtcgataaagacggtacttatgacaaagtttacattcttttcactgatactatcggctcaaagagaattgttaaaattccgtatatagcacaaatgtgcctaaacgacgaaggtggtccatcatcgttgtctagtcatagatggtcgacgtttctcaaagtcgaattagaatgtgatatcgacggaagaagttatagataaattattcattctaaaactataaaaacagataatgatacgatactatatgtattcttcgatagtccgcattatgtacctattctatgaataccattaaacaatctttttctacgtcaaaattggaaggatatacaaagcaattgccgtctccagctcctggtatatgtctaccagctggaaaagttgttccacataccacgtttgaagtcatagaaaaatataatgtactagatgatattataaagcctttatctaaccaacctatcttcgaaggaccgtctggtgttaaatggttcgatataaaggagaaggaaaatgaacatcgggaatatagaatatacttcataaaagaaaattctatatattcgttcgatacaaaatctaaacaaactcgtagctcgcaagtcgatgcgcgactattttcagtaatggtaacttcgaaaccgttatttatagcagatatagggataggagtaggaatgccacaaatgaaaaaaatacttaaaatgtaatcttaatcgagtacaccacacgacaatgaacaaacataagacagattatgctggttatgcttgctgcgtaatatgcggtctaattgttggaattatttttacagcgacactattaaaagttgtagaacgtaaattagttcatacaccatcaatagataaaacgataaaagatgcatatattagagaagattgtcctactgactggataagctataataataaatgtatccatttatctactgatcgaaaaaacctgggaggaaggacgtaatgcatgcaaagctctaaatccaaattcggatctaattaagatagagactccaaacgagttaagttttttaagaagccttagacgaggctattgggtaggagaatccgaaatattaaaccagacaaccccatataattttatagctaaaaatgccacgaagaatggaactaaaaaacggaaatatatttgtagtacaacgaatactcccaaactgcattcgtgttacactatataacaattacactacatttttatcataacactacttcggttagatgttttagaaaaaaataaatatcgccgtaccgttcttgtttttataaaaataacaattaacaattatcaaattttttctttaatattttacgtggttgaccattcttggtggtaaaataatctcttagtgttggaatggaatgctgtttaatgtttccgcactcatcgtatattttgacgtatgcagtcacatcgtttacgcaatagtcagactgtagttctatcatgcttcctacatcagaaggaggaacagttttaaagtctcttggttttaatctattgccattagttttcatgaaatcctttgttttatccacttcacattttaaataaatgtccactatacattcttctgttaattttactagatcgtcatgggtcatagaatttataggttccgtagtccatggatccaaactagcaaacttcgcgtatacggtatcgcgattagtgtatacaccaactgtatgaaaattaagaaaacagtttaataaatcaacagaaatatttaatcctccgtttgatacagatgcgccatatttatggatttcggattcacacgttgtttgtctgaggtgttcgtctagtgttgcttctacgtaaacttcgattcccatatattctttattgtcagaatcgcataccgatttatcatcatacactgtttgaaaactaaatggtatacacatcaaaataataaataataacgagtacattctgcaatattgttatcgtaattggaaaattagtgttcgagtgagtcggattatgtgagtactggattgtatattttattttatattttgtaataagaataaaatgctaatgtcaagtttattccaatagatgtcttattaaaaaacatatataataaataacaatggctgaatggcataaaattatcgaggatatctcaaaaaataataagttcgaggatgccgccatcgttgattacaagactacaaagaatgttctagctgctattcctaacagaacatttgccaagattaatccgggtgaaattattcctctcatcactaatcgtaatattctaaaacctcttattggtcagaaatattgtattgtatatactaactctctaatggatgagaacacgtatgctatggagttgcttactgggtacgcccctgtatctccgatcgttatagcgagaactcataccgcacttatatttttgatgggtaagccaacaacatccagacgtgatgtgtatagaacgtgtagagatcacgctacccgtgtacgcgcaactggtaattaaaataaaaagtaatattcatatgtagtgtcaattttaaatgatgatgatgaaatggataatatccatattgacgatgtcaataatgccggtattggcatacagctcatcgatttttagatttcattcagaggatgtggaattatgttatgggcatttgtattttgataggatctataatgtagtaaatataaaatataatccgcatattccatatagatataattttattaatcgcacgttaaccgtagatgaactagacgataatgtcttttttacacatggttattttttaaaacacaaatatggttcacttaatcctagtttgattgtctcattatcaggaaacttaaaatataatgatatacaatgctcagtaaatgtatcgtgtctcattaaaaatttggcaacgagtacatctactatattaacatctaaacataagacttattctctacatcggtccacgtgtattactataataggatacgattctattatatggtataaagatataaatgacaagtataatgacatctatgattttactgcaatatgtatgctaatagcgtctacattgatagtgaccatatacgtgtttaaaaaaataaaaatgaactcttaattatgctatgctattagaaatggataaaatcaaaattacggttgattcaaaaattggtaatgttgttaccatatcgtataacttggaaaagataactattgatgttacacctaaaaagaaaaaagaaaaggatgtattattagcgcaatcagttgctgtcgaagaggcaaaagatgtcaaggtagaagaaaaaaatattatcgatattgaagatgacgatgatatggatgtagaaagcgcataatacgatctataaaaataagtatataataaatactttttatttacggtactcttgtagtggtgataccctactcaattatttttttaaaaaaatacttattctgattcttctagccatttccgtgttcgttcgaatgccacatcgacgttaaagataggggagtagttgaaatctagttctgcattgttggtacgcacctcaaatgtagtgttggatatcttcaacgtatagttgttgagtagtgatggttttctaaatagaattctcttcatatcattcttgcacgcgtacatttttagcatccatcttggaattctagatccttgttctattcccaatggtttcatcaatagaagattaaacatatcgtacgaacacgatggagagtaatcgtagcaaaagtaagcatttcctttaatcttagatcccggatactggatatattttgcagccaacacgtgcatccatgcagcatttcctacatatacccggctatgcaccgcgtcatcatcgactgtacgatacataatgttaccgtgttgcttacattgctcgtaaaagactttcgtcaatttgtctccttctccgtaaattccagtgggtcttaggcaacaagtatacaattttgctccattcatgattacggaattattggctttcataaccagttgctcggccatacgtttactttttgcgtatacatgtcctggtgatatatcataaagggtatgctcatggccgatgaatggatcaccgtgtttattgggtcctattgcttccatgctactagtatagatcaaatacttgattcctaggtccacacaagctgccaatatagtctgtgttccataatagtttactttcatgatttcattatcggtgtattttccaaatacatccactagagcagccgtatgaataatcagatttaccccatctagcgcttctctcaccttatcaaagtcgtttatatcacattgtatatagtttataaccttaactttcgaggttattggttgtggatcttctacaatatctatgactctgatttcttgaacatcatctgcactaattaacagttttactatatacctgcctagaaatccggcaccaccagtaaccgcgtacacggccattgctgccactcataatatcagactacttattctattttactaaataatggctgtttgtataatagaccacgataatatcagaggagttatttactttgaaccagtccatggaaaagataaagttttaggatcagttattggattaaaatccggaacgtatagtttgataattcatcgttacggagatattagtcaaggatgtgattccataggcagtccagaaatatttatcggtaacatctttgtaaacagatatggtgtagcatatgtttatttagatacagatgtaaatatatttacaattattggaaaggcgttatctatttcaaaaaatgatcagagattagcgtgtggagttattggtatttcttacataaatgaaaagataatacattttcttacaattaacgagaatggcgtttgatatatcagttaatgcgtctaaaacaataaatgcattagtttacttttctactcagcaaaataaattagtcatacgtaatgaagttaatgatacacactacactgtcgaatttgatagggacaaagtagttgacacgtttatttcatataatagacataatgacaccatagagataagaggggtgcttccagaggaaactaatattggttgcgcggttaatacgccggttagtatgacttacttgtataataagtatagttttaaactgattttagcagaatatataagacacagaaatactatatccggcaatatttattcggcattgatgacactagatgatttggctattaaacagtatggagacattgatctattatttaatgagaaacttaaagtagactccgattcgggactatttgactttgtcaactttgtaaaggatatgatatgttgtgattctagaatagtagtagctctatctagtctagtatctaaacattgggaattgacaaataaaaagtataggtgtatggcattagccgaacatatatctgatagtattccaatatctgagctatctagactacgatacaatctatgtaagtatctacgcggacacactgagagcatagaggatgaatttgattattttgaagacgatgattcgtctacatgttctgccgtaaccgacagggaaacggatgtataattttttttatagcgtgaaggatatgataaaaaatataattgttgtatttatcccattccaatcaccttatatgattctgtaaaaaaattatactgtaacacaataaaggagtcttatagatgtatagaggtcagatactggtttgataaactgtttattccacataagtatgtttgactttatggttagacccgcatactttaacaaatcactgaaaattggagttaggtattgacctctcagaatcagttgccgttctggaacattaaatgtattttttatgatatactccaacgcatttatgtgggcatacaacaagtcattactaatggagtattccaagagttttagttgtctagtatttaacaagagaagagatttcaacagactgtttatgaactcgaacgccgcctcattgtcgcttatattgatgatgtcgaattctcccaatatcatcactgatgagtagctcatcttgttatcgggatccaagttttctaaagatgtcattaaaccctcgatcatgaatggatttatcatcatcgtttttatgttggacatgagcttagtccgtttgtccacatctatagacgacgatttctgaattatttcatatatccctctctttaactccaggaacttgtcaggatggtctactttaatatgttctcgtctaagagatgaaaatctttggatggttgcacgcgacttttctttaaaggatgacgttgcccaagatcctctcttaaatgaatccatcttatccttggacaagatggacagtctattttccttagatggtttaatatttttgttacccatgatctataaaggtagacctaatcgtctcggatgaccatatatttattttcagttttattatacgcataaattgtaaaaaatatgttaggtttacaaaaatgtctcgtggggcattaatcgtttttgaaggattggacaaatctggaaaaacaacacaatgtatgaacatcatggaatctataccggcaaacacgataaaatatcttaactttcctcagagatccactgtcactggaaagatgatagatgactatctaactcgtaaaaaaacctataatgatcatatagttaatctattattttgtgcaaatagatgggagtttgcatcttttatacaagaacaactagaacagggaattactttaatagttgatagatacgcattttctggagtagcgtatgccgccgctaaaggcgcgtcaatgactctcagtaagagttatgaatctggattgcctaaacccgacttagttatattcttggaatctggtagcaaagaaattaatagaaacgtcggcgaggaaatttatgaagatgttacattccaacaaaaggtattacaagaatataaaaaaatgattgaagaaggagatattcattggcaaattatttcttctgaattcgaggaagatgtaaagaaggagttgattaagaatatagttatagaggctatacacacggttactggaccagtggggcaactgtggatgtaatagtgaaattacattttttataaatagatgttagtacagtgttataaatggatgaagcatattactctggcaacttggaatcagtactcggatacgtgtccgatatgcataccgaactcgcatcaatatctcaattagttattgccaagatagaaactatagataatgatatattaaacaaggacattgtaaattttatcatgtgtagatcaaacttggataatccatttatctctttcctagatactgtatatactattatagatcaagagatctatcagaccgaattgattaattcattagacgacaatgaaattatcgattgtatagttaacaagtttatgagcttttataaggataacctagaaaatatagtagatgctatcattactctaaaatatataatgaataatccagattttaaaactacgtatgccgaagtactcggttccagaatagccgatatagatattaaacaagtgatacgtaagaatatactacaattgtctaatgatatccgcgaacgatatttgtgaaaaatattaaaaaaaaatactttttttattaaatgacgtcgcttcgcgaatttagaaaattatgctgtgatatatatcacgcatcaggatataaagaaaaatctaaattaattagagactttataacagatagggatgataaatatttgatcattaagctattgcttcccggattagacgatagaatttataacatgaacgataaacaaattataaaattatatagtataatatttaaacaatctcaggaagatatgctacaagatttaggatacggatatataggagacactattaggactttcttcaaagagaacacagaaatccgtccacgagataaaagcattttaactttagaagaagtggatagttttttaactacgttatcatccgtaactaaagaatcgcatcaaataaaattattgactgatgtagcatctgtttgtacatgtaatgatttaaaatgtgtagtcatgcttattgataaagatctaaaaattaaagcgggccctcggtacgtacttaacgctattagtcctcatgcctatgatgtgtttagaaaatctaataacttgaaagagataatagaaaatgcatctaaacaaaatctagactctatatctatttctgttatgactccaattaatcccatgttagcggaatcgtgtgattctgtcaataaggcgtttaaaaaatttccatcaggaatgtttgcggaagtcaaatacgatggtgaaagagtacaagttcataaaaataataacgagtttgccttctttagtagaaacatgaaaccagtactctctcataaagtggattatctcaaagaatacataccgaaagcatttaaaaaagctacgtctatcgtattggattctgaaattgttcttgtagacgaacataatgtaccgctaccgtttggaagtttaggaatacacaaaaagaaagaatataaaaactctaacatgtgtttgttcgtgtttgactgtttgtactttgatggattcgatatgacggacattccattgtacgaacgaagatcttttctcaaagatgttatggttgaaatacccaatagaatagtattctcagagttgacgaatattagtaacgagtctcagttaactgacgtattggatgatgcactaacgagaaaattagaaggattggtcttaaaagatattaatggagtatacgaaccgggaaagagaagatggttaaaaataaagcgagactatttgaacgagggttccatggcagattctgccgatttagtagtactaggtgcctactatggtaaaggagcaaagggtggtatcatggcagtctttctaatgggttgttacgacgatgaatccggtaaatggaagacggttaccaagtgttcaggacacgatgataatacgttaagggagttgcaagaccaattaaagatgattaaaattaacaaggatcccaaaaaaattccagagtggttagtagttaataaaatctatattcccgattttgtagtagaggatccgaaacaatctcagatatgggaaatttcaggagcagagtttacatcttccaagtcccataccgcaaatggaatatccattagatttcctagatttactaggataagagaggataaaacgtggaaagaatctactcatctaaacgatttagtaaacttgactaaatcttaatagttacatacaaactgaaaattaaaataacaccatttagttggtggtcgccatggatggtgttattgtatactgtctaaacgcgttagtaaaacatggcgaggaaataaatcatataaaaaatgatttcatgattaaaccatgttgtgaaagagtttgtgaaaaagtcaagaacgttcacattggcggacaatctaaaaacaatacagtgattgcagatttgccatatatggataatgcggtatccgatgtatgcaattcactgtataaaaagaatgtatcaagaatatccagatttgctaatttgataaagatagatgacgatgacaagactcctactggtgtatataattattttaaacctaaagatgttattcctgttatcatatctataggaaaggataaagatgtctgtgaactattaatctcatcagacatatcgtgtgcatgcgtggagttaaattcatatcacgtagccattcttcccatgaatgtttccttttttaccaaaggaaatgcctcgttgattattctcctgtttgatttctctatcgatgcagcacctctcttaagaagtgtaaccgataataatgttattatatctagacaccagcgtctacatgacgagcttccgagttccaattggttcaagttttacataagtataaagtccgactattgttctatattatatatggttgttgatggatctgtgatgcatgcgatagctgataatagaactcacgcaattattagcaaaaatatattagacaatactacaattaacgatgagtgtagatgctgttattttgaaccacagattaggattcttgatagagatgagatgctcaatggatcatcgtgtgatatgaacagacattgtattatgatgaatttacctgatgtaggcgaatttggatctagtatgttggggaaatatgaacctgacatgattaagattgctctttcggtggctggtaatttaataagaaatcgagactacattcccgggagacgaggctatagctactacgtttacggtatagcctctagataatttttttaagcacgaaataaaaaacataattttaaaccaatctatttcatactattttgtgtgatcaccatggacataaagatagatattagtatttctggtgataaatttacggtgactactaggagggaaaatgaagaaagaaaaaaatatctacctctccaaaaagaaaaaactactgatgttatcaaacctgattatcttgagtacgatgacttgttagatagagatgagatgtttactattctagaggaatattttatgtacagaggtctattaggcctcagaataaaatatggacgactctttaacgaaattaaaaaattcgacaatgatgcggaagaacaattcggtactatagaagaactcaagcagaaacttagattaaattctgaagagggagcagataactttatagattatataaaggtacaaaaacaggatatcgtcaaacttactgtatacgattgcatatctatgataggattgtgtgcatgcgtggtagatgtttggagaaatgagaaactgttttctagatggaaatattgtttacgagcgattaaactgtttattaatgatcacatgcttgataagataaaatctatactgcagaatagactagtatatgtggaaatgtcatagaaagttaatgagagcaaaaatatataaggttgtattccatatttgttattttttctgtaatagttaaaaaaatacattcgatggtctatctatcagattattatgtgttataaggtactttttctcataataaactagagtatgagtaagatagtgtttttcaaaacatataaatctaaaattgatggatgagatatacagctattaatttcgaaaatatataaatctaaaattgatggataagatatacagctattaatttcgaaaatatattttaatctgataactttaaacatggatttttgatggtggtttaacgttttaaaaaaagattttgttattgtagtatatgataatattaaaagatggatataaagaatttgctgactgcatgtactattttttacattactacattggctacggcagatatacctactccgccaccaacgggtcatgtgacaagggagaatatcttgataagaggcataatcaatgttgtaatcggtgtccacctggagaatttgccaaggttagatgtaatggtaacgataacacaaaatgtgaacgctgcccacctcatacatataccacaatccccaattattctaatggatgtcatcaatgtagaaaatgcccaaccggatcatttgataaggtaaagtgtaccggaacacagaacagtaaatgttcgtgtcttcctggttggtattgcgctactgattcttcacagactgaagattgttgaaattgtgtaccaaaaaggagatgtccatgcggatactttggtggaatagatgaacaaggaaatcctatttgtaaatcgtgctgtattggtgaatattgcaactacctacgtaattatagacttgatccattttctccatgcaaactatctaaatgtaattaattatgattttgatgataatgttaccatacattatatcgctacttggttagtgtattattcagtatgaagacctattaataattacttatcttttgacgatcttgttataattataatataaaaacttatggcatagtaactcataattgctgacgcgataaattcgtaataatctgttttgttcaaatttttataaggaatctacaggcataaaaataaaaatataatttataatatactcttacagcgcgccatcatgaatagcagcagtaaattaattgctgttattaatggatttagaaatagtggacgattttgtgatattaatatagttattaatgatgaaaggataaacgctcacagactcatcctatctggagcctccgaatatttttccattctgttttccaataattttatcgattctaatgaatacgaagttaatctaagtcatttagattatcaaagtgttaacgatttgatcgattacatttatgggatacctttgagcctaactaacgataacgtgaaatatattctttcaaccgctgattttttacaaattggatctgccattactgagtgcgaaaaatacatacttaaaaatctttgttctagaaactgtatcgatttctacatatacgctgataaatataataacaagaaaatagaatcagcgtcgtttaacacaatattacgaaatattttgagactcatcaacgatgaaaactttaaatacttaacagaggaatcaatgataaaaattttaagcgatgatatgttaaatataaaaaatgaggattttgcaccactaattctcattaaatggttagagagtactcaacaatcatgcaccgtcgagttacttagatgcctcagaatatcattgctttccccacaagttataaaatcactttatagtcatcaactggttagttcaatctacgaatgtataacattcttaaacaatatagcattcttggatgaatcatttcctagataccatagcatcgagttgatatctatcggtataagtaattcgcatgataagatttccataaactgctacaatcataaaaaaaatacatgggaaatgatatcttcacgtagatataggtgtagtttcgcagtggccgtcctggataatattatctatatgatgggtggatatgatcagtccccgtatagaagttcaaaggttatagcgtacaatacatgtacaaattcttggatatatgatataccagagctaaaatatcctcgttctaattgtgggggactggctgatgacgaatacatttattgtataggcggcatacgcgatcaggattcatcgttgacatctagtattgatagatggaagccatcaaaaccatattggcagaagtatgctaaaatgcgcgaaccaaaatgtgatatgggggttgcgatgttaaacggattaatatatgtcatgggtggaatcgttaaaggtgacacgtgtaccgacgcactagagagtttatcagaagatggatggatgaagcatcaacgtcttccaataaaaatgtccaatatgtcgacgattgttcatgatggcaagatttatatatctggaggttacaacaatagtagtgtagttaatgtaatatcgaatctagtccttagctataatccgatatatgatgaatggaccaaattatcatcattaaacattcctagaattaatcccgctctatggtcagcgcataataaattatatgtaggaggaggaatatctgatgatgttcgaactaatacatctgaaacatacgataaagaaaaagattgttggacattggataatggtcacgtgttaccacgcaattatataatgtataaatgcgaaccgattaaacataaatatccattggaaaaaacacagtacacgaatgattttctaaagtatttggaaagttttataggtagttgatagaacaaaatacataattttgtaaaaataaatcactttttatactaatatgacacgattaccaatacttttgttactaatatcattagtatacgctacaccttttcctcagacatctaaaaaaataggtgatgatgcaactctatcatgtaatcgaaataatacaaatgactacgttgttatgagtgcttggtataaggtacctagtagaatttcattttgtttttttctatgctataaatactgcagaccatgtaccgaatgcagctcctctcttgcatagctctctctttggcacttgtgactaacagtgcaccgacgtcttccagtactaagaagacgcaattgcaactggagcacttgctgttggatcttcaaatgattctgaacggaattaacaactacaagaacccaaagcttacccggatgctcactgctaagttctatatgcctaaaaaagccaccgagctgaaacatcttcaatgcctcgaagaagctcttaaacctcttgaggaggttctgaacctggctcagagcaaaaactttcatttcgacccgcgagatgtggtcagcaacataaacgtgtttgtgcttgaactcaaggggagtgaaactacctttatgtgcgagtatgcagatgagactgccacaatcgttgaattccttaatcgatggatcacattctgccagagcattatttcaaccttgactggtgggggtggttctggtggcggtggatcaggagggggtggaagcaggggcgtattccgaagagacgctcataaaagcgaggtggcccaccgattcaaggacttgggagaagaaaatttcaaggccctcgtcctgattgcctttgcccagtaccttcaacaatgtccattcgaggaccacgttaagcttgtgaatgaagttactgaatttgcaaagacgtgcgtcgcggacgagtctgccgaaaactgcgataaaagcttgcacactctgttcggggataagctctgcacagtggcaacccttcgcgaaacatatggcgaaatggctgattgttgcgcaaaacaagagcccgagaggaatgagtgctttttgcaacacaaagatgataacccaaatctccctaggctggttcgccccgaagtggacgtaatgtgtacggcgtttcatgacaacgaggaaacctttctcaaaaagtatttgtacgagattgctagacgccatccttatttctatgctcccgagttgctgttttttgccaaaagatataaagcagcattcaccgagtgttgtcaggctgccgacaaggcagcatgtcttcttccgaaactggacgagctgagggacgaggggaaagccagtagtgcaaagcaacgattgaaatgtgcatcattgcagaagttcggtgaaagagcatttaaagcttgggcagtagctcggttgagccaacgatttcccaaggctgagtttgccgaagttagtaagctcgtcacggacctcacgaaagtccacacagagtgttgccatggcgacctcctcgagtgcgcagatgatcgagctgatcttgccaagtatatctgtgaaaatcaagattcaattagctctaaattgaaggaatgttgcgaaaaacccttgttggaaaagtcacattgtattgcggaggtcgaaaatgacgaaatgcccgccgatttgccttccctggctgcggattttgtcgagagcaaggatgtgtgtaagaactatgcagaggcaaaggatgtattcttggggatgttcctttacgaatacgccagacgccaccctgactacagcgtagtgctccttttgcgcttggccaaaacatatgaaacgaccctcgaaaaatgttgtgctgcggcagatccgcacgagtgttacgccaaggtattcgacgaatttaagccacttgttgaagagccgcagaatcttatcaagcagaattgcgaactttttgagcagctcggagagtataagttccagaatgcgttgctcgtgcgatacaccaaaaaagtgccgcaggtatccacccccaccctggtcgaagtatccagaaatctcgggaaagttggctccaagtgttgtaaacacccggaggcgaagagaatgccttgcgcagaagattacctttccgtcgtcctgaatcaactgtgcgtcctccatgagaaaacaccagtctcagatcgcgtgacgaagtgttgcacggagagcttggtcaacagacggccctgtttctcagcgctggaggtagatgaaacatatgtgccgaaggagtttaatgcggaaaccttcaccttccatgccgacatctgtactctgagcgagaaggagagacagataaagaaacaaacggctcttgttgaactggtgaaacacaaaccaaaggctacaaaagaacagcttaaagcagtgatggacgatttcgcagcatttgtcgaaaaatgctgcaaggctgatgacaaagagacgtgcttcgctgaagagggtaaaaagctcgtcgcggcgtctcaagcagcactcggcctctgattaattaatttttatgagctcatgcggatctttatgatacgtacaatgataatgatacagtaccaccaactactgtaggcggtagtacaacctctattagcaattataaaaccaaggactttgtagaaatatttggtattaccgcattaattatattgtcggccgtggcaatattctgtattacatattatatatataataaacgttcacgtaaatacaaaacagagaacaaagtctagatttttgacttacataaatgtctgggatagtaaaatctatcatattgagcggaccatctggttcaggaaagacagccatagccaaaagactatgggaatatatttggatttgtggtgtcccataccactagatttcctcgtcctatggaacgagaaggtgtcgattaccattacgttaacagagaggccatctggaagggaatagccgccggaaactttctagaacatactgagtttttaggaaatatttacggaacttctaaaactgctgtgaatacagcggctattaataatcgtatttgtgtgatggatctaaacatcgatggcgttagaagtcttaaaaatacgtacctaatgccttactcggtgtatataagacctacctctcttaaaatggttgagaccaagcttcgttgtagaaacactgaagcggatgatgagattcatcgtcgtgtgatgttggcaaaaactgacatggatgaggcaggtgaagccggtctattcgacactattatcattgaagatgatgtgaatttagcatatagtaagttaattcagatactacaggaccgtattagaatgtattttaacactaattagagacttaagacttaaaacttgataattaataatataactcgtttttatatgtggctatttcaacgtctaatgtattagttaaatattaaaacttaccacgtaaaacttaaaatttaaaatgatatttcattgacagatagatcacacattatgaactttcaaggacttgtgttaactgacaattgcaaaaatcaatgggtcgttggaccattaataggaaaaggtggattcggtagtatttatactactaatgacaataattatgtagtaaaaatagagcccaaagctaacggatcattatttaccgaacaggcattttatactagagtacttaaaccatccgttatcgaagaatggaaaaaatctcacaatataaagcacgtaggtcttatcacgtgcaaggcatttggtctatacaaatccattaatgtggaatatcgattcttggtaattaatagattaggtgcagatctagatgcggtgatcagagccaataataatagattaccaaaaaggtcggtgatgttgatcggaatcgaaatcttaaataccatacaatttatgcacgagcaaggatattctcacggagatattaaagcgagtaatatagtcttggatcaaatagataagaataaattatatctagtggattacggattggtttctaaattcatgtctaatggcgaacatgttccatttataagaaatccaaataaaatggataacggtactctagaatttacacctatagattcgcataaaggatacgttgtatctagacgtggagatctagaaacacttggatattgtatgattagatggttgggaggtatcttgccatggactaagatatctgaaacaaagaattgtgcattagtaagtgccacaaaacagaaatatgttaacaatactgcgactttgttaatgaccagtttgcaatatgcacctagagaattgctgcaatatattaccatggtaaactctttgacatattttgaggaacccaattacgacgagtttcggcacatattaatgcagggtgtatattattaagtgtggtgtttggtcgatgtaaaatttttgtcgataaaaattaaaaaataacttaatttattattgatctcgtgtgtacaaccgaaatcatggcgatgttttacgcacacgctctcggtgggtacgacgagaatcttcatgcctttcctggtaccaaaaattgaaaaactagcgtctttttttgctcgactgcagaccatggagacacccaagcctaggatactgccctggctcgtgagccagctcgatctcggccaactcgaaggtgtcgcttggttggacgagtcaaggacaagattcagaataccctggaagcatggcctgagacaggatgctcagatggccgattttggtatttttcaagcttgggccgaagcttctggtgcttacacccccggcaaggataaacctgatgtgtccacttggaaacggaatttccggtctgccttgaaccggaaggaagtgttgcgcctcgccgcagataactctaaagatccttacgaccctcacaaagtttatgagtttgttactcccggggcaagagattttgtgcatcttggggcttcacccgatactaatggaaaaagtagtcttccccacagtcaggagaatcttcccaaactttttgatgggcttattctcgggcccttgaaggatgaggggagttccgatttggcaatagtctctgacccaagccagcaactgccatcaccaaacgtcaacaattttctcaatccagccccccaagagaacccccttaaacagcttcttgccgaggagcaatgggagttcgaagttactgccttctatcgcgggaggcaggtattccaacaaaccttgttttgtccaggaggcttgagactcgtgggcagcactgctgatatgactctgccctggcagccagtgaccctccccgaccctgaagggttcctgactgacaaactcgtgaaggagtacgtgggacaagtactgaagggcctgggaaatggtcttgccctctggcaagctggacagtgcttgtgggctcaacgccttggacattcacacgcattttgggccctcggggaggagcttcttcctgacagtggccgcggaccagatggcgaggtacataaggataaagatggtgcagtcttcgacctcagaccatttgtcgcagaccttatcgccttcatggaaggttccggtcacagccctagatatacactttggttctgtatgggggaaatgtggccacaagatcaaccttgggtcaagcgccttgttatggtaaaggtggtccctacatgtttgaaagagctgctcgaaatggctcgggaaggaggagcctcttctttgaaaactgtagacctgcacatatctaacagccaaccaatcagcctgacctccgatcagtacaaagcttaccttcaagaccttgtcgaggacatggacttccaagccacaggcaacatttgattaattaatttttatgagctcctggtaaaagttaaacttggggagaatgatacagaaaatctttcttctactatatcggcggcaccatcgaggtaaccacctctcaagaagaccgcgtgaataatgtactcatgaaacgtttggaaactatacgccatatgtggtctgttgtatatgatcattttgatattgtgaatggtaaagaatgctgttatgtgcatacgcattcatctaatcaaaatcctataccgagtactgtaaaaacaaatttgtacatgaagactatgggatcatgcattcaaatggattccatggaagctctagagtatcttagcgaactgaaggaatcaggtggatggagtcccagaccagaaatgcaggaatttgaatatccagatggagtggaagacactgaatcaattgagagattggtagaggagttcttcaatagatcagaacttcaggctggtaaattagtcaaatttggtaattctattaattgttaaacatacatctgtttcagctaagcaactaagaacacgtatacggcagcagcttccttttatactctcatcttttaccaacacaaagggtggatatttgttcattggagttgataataatacacacaaagtatttggattcacggtgggttacgactacctcagactgatagagaatgatatagaaaagcatatcaaaagactttgtgttgtgcatttctgtgagaagaaagaggacatcaagtacacgtgtcgattcatcaaggtatataaacctggggatgaggctacctcgacatacgtgtgcgctatcaaagtggaaagatgctgttgtgctgtgtttgcagattggccagaatcatggtatatggatactaatggtatcaagaagtattctccagatgaatgggtgtcacatataaaattttaattaatgtaactatagagaacaaataataggttgtaatatcatatagacaataactaacaattaattagtaactgttatctcttttttaactaaccaactaactatatacctattaatacatcgtaattatagttcttaacatctattaatcattgattcgcttctttaattttttataaactaacattgttaattgaaaagggataacatgttacagaatataaattatatatggatttttttaaaaaggaaatacttgactggagtgtatatttatctcttcattatatagcacgcgtgtgttccaattcttccacatcccatataatacaggattataatctcgttcgaacatacgagaaagtggataaaacaatagttgattttttatctaggttgccaaatttattccatattttagaatatggggaaaatattctacatatttattctatggatgatgctaatacgaatattataattttttttctagatagagtattaaatattaataagaacgggtcatttatacacaatctcaggttatcatcatccattaatataaaagaatatgtatatcaattagttaataatgatcatccagataataggataagactaatgcttgaaaatggacgtagaacaagacattttttgtcctatatatcagatacagttaatatctatatatgtattttaataaatcatggattttatatagatgcagaagacagttacggttgtacattattacatagatgtatatatcactataagaaatcagaatcagaatcatacaatgaattaattaagatattgttaaataatggatccgatgtagataaaaaagatacgtacggaaacacaccttttatcctattatgtaaacacgatatcaacaacgtggaattgtttgagatatgtttagagaatgctaatatagactctgtagactttaatagatatacacctcttcattatgtctcatgtcgtaataaatatgattttgtaaagttattaatttctaaaggagcaaatgttaatgcgcgtaataaattcggaactactccattttattgtggaattatacacggtatctcgcttataaaactatatttggaatcagacacagagttagaaatagataatgaacatatagttcgtcatttaataatttttgatgctgttgaatctttagattatctattatccagaggagttattgatattaactatcgtactatatacaacgaaacatctatttacgacgctgtcagttataatgcgtataatacgttggtctatctattaaacagaaatggtgattttgagacgattactactagtggatgtacatgtatttcggaagcagtcgcaaacaacaacaaaataataatggaagtactattgtctaaacgaccatctttgaaaattatgatacagtctatgatagcaattactaaaaataaacaacataatgcagatttattgaaaatgtgtataaaatatactgcgtgtatgaccgattatgatactcttatagatgtacagtcgctacagcaatataaatggtatattttaaaatgtttcgatgaaatagatatcatgaagagatgttatataaaaaataaaactgtattccaattagttttttgtatcaaagacattaatactttaatgagatatggtaaacatccttctttcgtgaagtgcactagtctcgacgtatacggaagtcgtgtacgtaatatcatagcatctattagatatcgtcagagattaattagtctattatccaagaagctggatgcgggagataaatggtcgtgttttcctaacgaaataaaatataaaatattggaaaactttaacgataacgaactatccacatatctaaaaatcttataaacactattaaaatataaaatctaagtaggataaaatcacactacatcattgtttccttttagtgctcgacagtgtatactatttttaacactcataaataaaaatgaaaacgatttccgttgttacgttgttatgcgtactacctgctgttgtttattcaacatgtactgtacccactatgaataacgctaaattaacgtctaccgaaacatcgtttaatgataaacagaaagttacatttacatgtgatcagggatatcattctttggatccaaatgctgtctgcgaaacagataaatggaaatacgaaaatccatgcaagaaaatgtgcacagtttctgattatgtctctgaattatatgataagccattatacgaagtgaattccaccatgacactaagttgcaacggcgaaacaaaatattttcgttgcgaagaaaaaaatggaaatacttcttggaatgatactgttacgtgtcctaatgcggaatgtcaacctcttcaattagaacacggatcgtgtcaaccagttaaagaaaaatactcatttggggaatatatgactatcaactgtgatgttggatatgaggttattggtgcttcgtacataagttgtacagctaattcttggaatgttattccatcatgtcaacaaaaatgtgatataccgtctctatctaatggattaatttccggatctacattttctatcggtggcgttatacatcttagttgtaaaagtggttttatactaacgggatctccatcatccacatgtatcgacggtaaatggaatcccatactcccaacatgtgtacgatctaacgaaaaatttgatccagtggatgatggtcccgacgatgagacagatttgagcaaactctcgaaagacgttgtacaatatgaacaagaaatagaatcgttagaagcaacttatcatataatcatagtggcgttaacaattatgggcgtcatatttttaatctccgttatagtattagtttgttcctgtgacaaaaataatgaccaatataagttccataaattgctaccgtaaatataaatccgttaaaataattaataatttaataacaaacaagtatcaaaagattaaagacttatagctagaatcaattgagatgtcttcttcagtggatgttgatatctacgatgccgttagagcatttttactcaggcactattataacaagagatttattgtgtatggaagaagtaacgccatattacataatatatacaggctatttacaagatgcgccgttataccgttcgatgatatagtacgtactatgccaaatgaatcacgtgttaaacaatgggtgatggatacacttaatggtataatgatgaatgaacgcgatgtttctgtaagcgttggcaccggaatactattcatggaaatgtttttcgattacaataaaaatagtatcaacaatcaactaatgtatgatataattaatagcgtatctataattctagctaatgagagatatagaagcgcttttaacgacgatggtatatacatccgtagaaatatgattaacaagttgtacggatacgcatctctaactactattggcacgatcgctggaggtgtttgttattatctgttgatgcatctagttagtttgtataaataattatttcaatatactagttaaaattttaagattttaaatgtataaaaaactaataacgtttttatttgtaataggtgcattagcatcctattcgaataatgagtacactccgtttaataaactgagtgtaaaactctatatagatggagtagataatatagaaaattcatatactgatgataataatgaattggtgttaaattttaaagagtacacaatttctattattacagagtcatgcgacgtcggatttgattccatagatatagatgttataaacgactataaaattattgatatgtataccattgactcgtctactattcaacgcagaggtcacacgtgtagaatatctaccaaattatcatgccattatgataagtacccttatattcacaaatatgatggtgatgagcaacaatattctattactgcagagggaaaatgctataaaggaataaaatatgaaataagtatgatcaacgatgatactctattgagaaaacatactcttaaaattggatctacttatatatttgatcgtcatggacatagtaatacatattattcaaaatatgatttttaaaaatttaaaatatattatcacttcagtgacagtagtcaaataacaaacaacaccatgagatatattataattctcgcagttttgttcattaatagtatacacgctaaaataactagttataagtttgaatccgtcaattttgattccaaaattgaatggactggggatggtctatacaatatatcccttaaaaattatggcatcaagacgtggcaaacaatgtatacaaatgtaccagaaggaacatacgacatatccgcatttccaaagaatgatttcgtatctttctgggttaaatttgaacaaggcgattataaagtggaagagtattgtacgggactatgcgtcgaagtaaaaattggaccaccgactgtaacattgactgaatacgacgaccatatcaatttgtacatcgagcatccgtatgctactagaggtagcaaaaagattcctatttacaaacgcggtgacatgtgtgatatctacttgttgtatacggctaacttcacattcggagattctaaagaaccagtaccatatgatatcgatgactacgattgcacgtctacaggttgcagcatagactttgtcacaacagaaaaagtgtgcgtgacagcacagggagccacagaagggtttctcgaaaaaattactccatggagttcgaaagtatgtctgacacctaaaaagagtgtatatacatgcgcaattagatccaaagaagatgttcccaatttcaaggacaaaatggccagagttatcaagagaaaatttaataaacagtctcaatcttatttaactaaatttctcggtagcacatcaaatgatgttaccacttttcttagcatgcttaacttgactaaatattcataactaatttttattaatgatacaaaaacgaaataaaactgcatattatacactggttaacgcccttataggctctaaccattttcaagatgaggtccctgattatagtccttctgttcccctctatcatctactccatgtctattagacgatgtgagaagactgaagaggaaacatggggattgaaaatagggttgtgtataattgccaaagatttctatcccgaaagaactgattgcagtgttcatctcccaactgcaagtgaaggattgataactgaaggcaatggattcagggatatacgaaacaccgataaattataaaaaaagcaatgtgtccgctgtttccgttaataatactattttcgtaactggcggattattcataaataactctaatagcacgatcgtggttaacaatatggaaaaacttgacatttataaagacaaacaatggtcgattatagaaatgcctatggctagggtatatcacggcatcgactcgacatttggaatgttatattttgccggaggtctatccgttaccgaacaatatggtaatttagagaaaaacaacgagatatcttgttacaatcctagaacgaataagtggtttgatatttcatatactatttataagatatccatatcatcattgtgtaaactaaataacgtcttctatgtatttagtaaggacattggatatgtggaaaagtatgatggtgcatggaagttagtacatgatcgtctccccgctataaaggcattatcaacttctccttattgattgaaaatgaaaatataaatagtttttatgtatagcagtattaccctatagttttattgcttactactaacatggatacagatgttacaaatgtagaagatatcataaatgaaatagatagagagaaagaagaaatactaaaaaatgtagaaattgaaaataataaaaacattaacaagaatcatccaagtggatatattagagaagcactcgttattaatacaagtagtaatagtgattccattgataaagaagttatagaatgtatcagtcacgatgtaggaatatagatcatatctactaatttttataatcgatacaaaacataaaaaacaactcgttattacatagcaggcatggaatccttcaagtattgttttgataacgatggcaagaaatggattatcggaaatactttatattctggtaattcaatactatataaggtcagaaaaaatttcactagttcgttctacaattacgtaatgaaaatagatcacaaatcacacaagccattgttgtctgaaatacgattctatatatctgtattggatcctttgactatcgacaactggacacgggaacgtggtataaagtatttggctattccagatctgtatggaattggagaaaccgatgattatatgttcttcgttataaagaattcgggaagagtattcgccccaaaggatactgaatcagtcttcgaagcatgcgtcactatgataaacacgttagagtttatacactctcgaggatttacccatggaaaaatagaaccgaggaatatactgattagaaataaacgtctttcactaattgactattctagaactaacaaactatacaagagtggaaactcacatatagattacaacgaggacatgataacttcaggaaatatcaattatatgtgtgtagacaatcatcttggagcaacagtttcaaaacgaggagatttagaaatgttgggatattgcatgatagaatggttcggtggcaaacttccatggaaaaacgaaagtagtataaaagtaataaaacaaaaaaaagaatataaaaaatttatagctactttctttgaggactgttttcctgaaggaaatgaacctctggaattagttagatatatagaattagtatacacgttagattattctcaaactcctaattatgacagactacgtaaactgtttatacaagattgaaattatattctttttttatagagtgtggtagtgttacggatatctaatattaatattagactatctctatcgcgctacacgaccaatatcgattactatggatatcttcagggaaatcgcatcttctatgaaaggagagaatgtattcatttctccagcgtcaatctcgtcagtattgacaatactgtattatggagctaatggatccactgctgaacagctatcaaaatatgtagaaacggaggagaacacggataaggttagcgctcagaatatctcattcaaatccatgaataaagtatatgggcgatattctgccgtgtttaaagattcctttttgagaaaaattggcgataagtttcaaactgttgacttcactgattgtcgcactatagatgcaatcaacaagtgtgtagatatctttactgaggggaaaatcaatccactattggatgaaccattgtctcctgatacctgtctcctagcaattagtgccgtatactttaaagcaaaatggttgatgccattcgaaaaggaatttaccagtgattatcccttttacgtatctccgacggaaatggtagatgtaagtatgatgtctatgtacggcaaggcatttaatcacgcatctgtaaaggaatcattcggcaacttttcaatcatagaactgccatatgttggagatactagtatgatggtcattcttccagacaagattgatggattagaatccatagaacaaaatctaacagatacaaattttaagaaatggtgtaactctctggaagctacgtttatcgatgttcacattcccaagtttaaggtaacaggttcgtataatcttgtggatactctagtaaagtcaggactgacagaggtgttcggttcaactggagattatagcaatatgtgtaattcagatgtgagtgtcgacgctatgattcacaaaacgtatatagatgtcaatgaagagtatacagaagcagctgcagcaacttgtgcactggtgtcagactgtgcatcaacaattacaaatgagttctgtgtagatcatccgttcatctatgtgattaggcatgttgatggaaaaattcttttcgttggtagatattgctctccgacaactaattgttaaccattttttttaaaaaaatagaaaaaacatgtggtattagtgcaggtcgttgttcttccaattgcaattggtaagatgacggccaactttagtacccacgtcttttcaccacagcactgtggatgtgacagactgaccagtattgatgacgtcagacaatgtttgactgaatatatttattggtcgtcctatgcataccgcaacaggcaatgcgctggacagttgtattccacactcctctcttttagagatgatgcggaatcagtgttcatcgacattcgcgagctggtaaaaaatatgccgtgggatgatgtcaaagattgtacagaaatcatccgttgttatataccggatgagcaaaaaaccatcagagagatttcggccatcatcggactttgtgcatatgctgctacttactggggaggtgaagaccatcccactagtaacagtctgaacgcattgtttgtgatgcttgagatgctcaattacgtggattataacatcatattccggcgtatgaattgatgagttgtacatcttgacattttctttcttctcttctccctttcttctcttctcccttcctccctcttctccctttcccagaaacaaacttttttacccactataaaataaaatgagtatactacctattatatttcttcctatatttttttattcttcattcgttcagacttttaacgcgcctgaatgtatcgacaaagggcaatattttgcatcattcatggagttagaaaacgagccagtaatcttaccatgtcctcaaataaatacgctatcatccggatataatatattagatattttatgggaaaaacgaggagcggataatgatagaattataccgatagataatggtagcaatatgctaattctgaacccgacacaatcagactctggtatttatatatgcattaccacgaacgaaacctactgtgacatgatgtcgttaaatttgacaatcgtgtctgtctcagaatcaaatatagatcttatctcgtatccacaaatagtaaatgagagatctactggcgaaatggtatgtcccaatattaatgcatttattgctagtaacgtaaacgcagatattatatggagcggacatcgacgccttagaaataagagacttaaacaacggacacctggaattattaccatagaagatgttagaaaaaatgatgctggttattatacatgtgttttagaatatatatacagaggtaaaacatataacgtaaccagaattgtaaaattagaggtacgggataaaataataccttctactatgcaattaccagatggcattgtaacttcaataggtagtaatttgactattgcgtgtagagtatcgttgagacctcccacaacggatgcagacgtcttttggataagtaatggtatgtattacgaagaagatgatggggacggagacggtagaataagtgtagcaaataaaatctatatgaccgataagagacgtgttattacatcccggttaaacattaatcctgtcaaggaagaagatgctacaacgtttacgtgtatggcgtttactattcctagcatcagcaaaacagttactgttagtataacgtgaatgtatgttgttacatttccatgtcaattgagtttataagaatttttatacattatcttccaacaaacaattgacgaacgtattgctatgattaactcccacgatactatgcatattattaatcattaacttgcagactatacctagtgctattttgacatactcatgttcttgtgtaattgcggtatctatattattaaagtacgtaaatctagctatagttttattatttaattttagataatataccgtctccttatttttaaaaattgccacatcctttattaaatcatgaatgggaatttctatgtcatcgttagtatattgtgaacaacaagagcagatatctataggaaagggtggaatgcgatacattgatctatgtagttttaaaacacacgcgaactttgaagaatttatataaatcattccatcgatacatccttctatgttgacatgtatatatccaggaattcttttattaatgtcaggaaatgtataaactaaaacattgcccgaaagcggtgcctctatctgcgttatatccgttcttaacttacaaaatgtaaccaatacctttgcatgacttgttttgttcggcaacgttagtttaaacttgacgaatggattaattacaatagcatgatccgcgcatctattaagtttttttactttaacgcccttgtatgtttttacagagactttatctaaatttctagtacttgtatgtgttataaatataacgggatatagaactgaatcacctaccttagatacccaattacattttatcagatccagataataaacaaattttgtcgccctaactaattctatattgttatatattttacaattggttatgatatcatgtaataacttggagtctaacgcgcatcgtcgtacgtttatacaattgtgatttagtgtagtatatctacacatgtatttttccgcactatagtattctggactagtgataaaactatcgttatatctgtcttcaatgaactcatcgagatattgctctctgtcatattcatacacctgcataaactttctagacatcttacaatccgtgttattttaggatcatatttacatatttacgggtatatcaaagatgttagattagttaatgggaatcgtctataataatgaatattaaacaattatatgaggacttttaccacaaagcatcataaaaatgagtcgtcgtctgatttatgttttaaatatcaaccgcaaatcaactcataaaatacaagagaatgaaatatatacatattttagtcattgcaatatagaccatacttctacagaacttgattttgtagttaaaaactatgatctaaacagacgacaacatgtaactgggtatactgcactacactgctatttgtataataattactttacaaacgatgtactgaagatattattaaatcatgacgtaaatgtaacgatgaaaaccagtagcggacgtatgcctgtttatatattgcttactagatgttgcaatatttcacatgatgtagtgatagatatgatagacaaagataaaaaccacttattacatagagactattccaacctattactagagtatataaaatctcgttacatgttattaaaggaagaggatatcgatgagaacatagtatccactttattagataagggaatcgatcctaactttaaacaagacggatatacagcgttacattattattatttgtgtctcgcacacgtttataaaccaggtgagtgtagaaaaccgataacgataaaaaaggccaagcgaattatttctttgtttatacaacatggagctaatctaaacgcgttagataattgtggtaatacaccattccatttgtatcttagtattgaaatgtgtaataatattcatatgactaaaatgctgttgacttttaatccgaatttcaaaatatgtaataatcatggattaacgcctatactatgttatataacttccgactacatacaacacgatattcttgttatgttaatacatcactatgaaacaaatgttggagaaatgccgatagatgagcgtcgtatgatcgtattcgagtttatcaaaacatattctacacgtccggcagattcgataacttatttgatgaataggtttaaaaatataaatatttatacccgctatgaaggaaagacattattacacgtagcatgtgaatataataatacacacgtaatagattatcttatacgtatcaacggagatataaatgcgttaaccgacaataacaaacacgctacacaactcattatagataacaaagaaaattccccgtataccatcgattgtttactgtatatacttagatatattgtagataagaatgtgataagatcgttggtggatcaacttccatctctacctatcttcgatataaaatcatttgagaaattcatatcctactgtatacttttagatgacacattttacgataggcacgttaagaatcgcgattctaaaacgtatcgatacgcattttcaaaatacatgtcgtttgataaatacgatggtataataactaaatgtcacgacgaaacaatgttactcaaactgtccactgttctagacactacactatatgcagttttaagatgccataattcgaaaaagttaagaagatacctcaacgagttaaaaaaatataataacgataagtcctttaaaatatattctaatattatgaatgagagataccttaatgtatattataaagatatgtacgtgtcaaaggtatatgataaactatttcctgttttcacagataaaaattgtctactaacattactaccttcagaaattatatacgaaatattatacatgctgacaattaacgatctttataatatatcgtatccacctaccaaagtatagttgtatttttctcatgcgatgtgtgtaaaaaaactgatattatataaatattttagtgccgtataataaagatgacgatgaaaatgatggtacatatatatttcgtatcattattgttattgctattccacagttacgccatagacatcgaaaatgaaatcacagaattcttcaataaaatgagagatactctaccagctaaagactctaaatggttgaatccagcatgtatgttcggaggcacaatgaatgatatagccgctctaggagagccattcagcgcaaagtgtcctcctattgaagacagtcttttatcgcacagatataaagactatgtggttaaatgggagaggctagaaaagaatagacggcgacaggtttctaataaacgtgttaaacatggtgatttatggatagccaactatacatctaaattcagtaaccgtaggtatttgtgtaccgtaactacaaagaatggtgactgtgttcagggtatagttagatctcatattaaaaaacctccttcatgcattccaaaaacatatgaactaggtactcatgataagtatggcatagacttatactgtggaattctttacgcaaaacattataataatataacttggtataaagataataaggaaattaatatcgacgacattaagtattcacaaacgggaaagaaattaattattcataatccagagttagaagatagtggaagatacaactgttacgttcattacgacgacgttagaatcaagaatgatatcgtagtatcaagatgtaaaatacttacggttataccgtcgcaagaccacaggtttaaactaatactagatccaaaaatcaacgtaacgataggagaacctgccaatataacatgcactgctgtgtcaacgtcattattgattgacgatgtactgattgaatgggaaaatccatccggatggcttataggattcgattttgatgtatactctgttttaactagtagaggcggtattaccgaggcgaccttgtactttgaaaatgttactgaagaatatataggtaatacatataaatgtcgtggacacaactattattttgaaaaaacccttacaactacagtagtattggagtaaatacacaatgcatttttatatacattactgaataattattattattatttatatcgtatttgtgctataacgcgactatctaggtatttgtatctcactgatagagaacatataaatatagactctattaaacagttgtgtaaaatatcaaatcctaatagatgtggatgtacggctttacatgagtacttttataattatagatcagtcaacggaaaatacaagtatagatacaacggttactatcaatattatttatctagcgattatgaaaattataatgaatattattatgatgattatgatagaactggtatgaacagtgagagtgataatatatcaatcaaaacagaatatgaattctatgatgaaacacaagatcaaagtacacaactagtaggttacgacattaaactcaaaaccaatgaggatgattttatggctatgatagatcagtgggtgtccatgattatatagatgaatcaattaataaagtagtatatggaagagagtctcacgtaagatggcgggatatatggcaagaacataatgatggcgtatacagtataggaaaggagtgcatagataatatatacgaagacaaccataccgtagacgaattctacaagatagacagcgtatcagatgtagatgacgcggaacacatatctccgataactaatgatgtatctacacaaacatgggaaaagaaatcagagttagatagatacatggaaatgtatcctcgtcatagatatagtaagcattctgtctttaagggattttctgacaaagttagaaaaaatgatttagacatgaatgtggtaaaagaattactttctaacggtgcatctctaacaattaaggatagcagtaataaggatccaataaccgtttattttcgaagaacgataatgaatttagaaatgattgatattattaacaaacatacaactattgatgaacgaaagtatatagtacactcctatctaaaaaattataaaaatttcgattatccatttttcaggaagttagttttgactaataaacattgtctcaacaattattataatataagcgacagcaaatatggaacaccgctacatatattggcgtctaataaaaaattaataactcctaattacatgaagttattagtgtataacggaaatgatataaacgcacgaggtgaagatacacaaatgcgaactccattacacaaatatttgtgtaaatttgtatatcataatattgaatatggtatccgatactataatgaaaagattatagacgcatttatagagttaggagccgatctaactattccaaataacgatggaatgataccagtagtttactgtatacactcaaatgcagaatatggttataacaatattactaacataaagataatacgtaaactacttaatcttagtagacgtgcgtcacataatctatttagagatcgagtcatgcacgattatataagtaatacatatattgatcttgagtgtttagatattattagatcgttggatggattcgatatcaatggttactttgaaggacgtacaccacttcattgcgctatacaacataacttcactcagattgctaagtacttattagatcgaggagctgatatagtcgtacccaacacattgattatacatcagtacatacagtaaatagcatagatatggaggaggatacaaatatttcaaataaagttataaggtacaacactgtcaataatatatggaagacattacctaacttctggactggaactataaatccaggcgtggtctcgcataaagatgatatatatgttgtatgcgacatcaaagatgaaaaaaatgttaagacttgtatatttagatataacacgaatacgtataacggatgggaattggttacgacgacagaaagcagattatcagctctgcatactattcttcatgacaataccataatgatgttacattgttatgaatcgtatatgttacaagatacatttaatgtgtacactcgcgaatggaatcatatgtgtcatcaacattcgaatagttatatcatgtacaatatactacccatctactaaatataatagaataaaataaatgagtatgatcattttagataacgattgattttatcattaccgcttcattcttatattctttgcttacggaacctatatttagaaacatctactaacgattttttatgcttgcattattaatggtatgtaatatgattgattgtgtacgcaataccaatttgttaagtatgaatacggggtacaaacataaactgaaatttaacattatttatttatgatatatatcgttatcgttattgtttggtctataccatggatatctttaaagaactaatcttaaaacaccctgatgaaaatgttttgatttctccagtttctattttatctactttatctattctaaatcatggagcagctggttctacagctgaacaactatcaaaatatatagagaatatgaatgagaatacacccgatgataagaaggatgacaataatgacatggacgtagatattccgtattgtgcgacactagctaccgcaaataaaatatacggtagcgatagtatcgagttccacgcctccttcctacaaaaaataaaagacgattttcaaactgtaaactttaataatgctaaccaaacaaaggaactaatcaacgaatgggttaagacgatgacaaatggtaaaattaattccttattgactagtccgctatccattaatactcgtatgacagttgttagcgccgtccattttaaagcaatgtggaaatatccattttctaaacatcttacatatacagacaagttttatatttctaagaatatagttaccagtgttgatatgatggtgggtaccgagaataacttgcaatatgtacatattaatgaattattcggaggattctctattatcgatattccatacgagggaaactctagtatggtaattatactaccggacgacatagaaggtatatataacatagaaaaaaatataacagatgaaaaatttaaaaaatggtgtggtatgttatctactaaaagtatagacttgtatatgccaaagtttaaagtggaaatgacagaaccgtataatctggtaccgattttagaaaatttaggacttactaatatattcggatattatgcagattttagcaagatgtgtaatgaaactatcactgtagaaaaatttctacatacgacgtttatagatgttaatgaggagtatacagaagcatcggccgttacaggagtatttatgactaacttttcgatggtatatcgtacgaaggtctacataaaccatccattcatgtacatgattaaagacaacacaggacgtatactttttatagggaaatactgctatccgcaataaatataaacaaatagacttttatcacgtttatctatgtctaaatattacaaatagtaatagtataaactaaagctgataatacttaaaaaaataataatatcatttacaattaatagtataaactaaaaattaaacaaatcgttattataagtaatatcaaaatgatgatatacggattaatagcgtgtcttatattcgtgacttcatccatcgctagtccactttatattcccgttattccacccattacggaagataaatcgttcaatagtgtagaggtattagtttccttgtttagagatgaccaaaaagactatacggtaacttctcagttcaataactacactatcgataccaaagactggactatcggcgtactatccacacctgatggtttggatataccattgactaatataacttattggtcacggtttactataggtcgtgcattgttcaaatcagagtctgaggatattttccaaaagaaaatgagtattctaggtgtttctatagaatgtaagaagtcgtcgacattacttacttttttgaccgtgcgtaaaatgactcgagtatttaataaatttccagatatggcttattatcgaggagactgtttaaaagccgtttatgtaacaatgacttataaaaatactaaaactggagagactgattacacgtacctctctaatggggggttgcctgcatactatcgtaatggggtcgatggttgattattgattagtatattccttattcacacaaaaagaacatttttataaacatgaaaccactgtctaaatgtaattatgatcttgatttatagatgaagatcagcctttagaggattttaaccagtatgtttaatatgaaaaaaataaacataacatattttgagattaagcgctattgtgcttaattattttgctctataaactgaatatatagccacaattattgacgggcttgtttatgaccggcaatcatgaatttacagaaattatctctggctatatatcttactgcgacatgttcgtggtgttatgaaacatgcataagaaaaactgcgttgtatcatgacattcaattggagcatgtagaagacaataaagatagtgtagcgtcgctaccgtacaagtagtcaatcaaagagaacgtagtagattgttggctacatttaattggacagatatagctgagggtgttagaaatgagttcattaaaatatgtgatatcaacggaacatatttatataattatactattgctgttagtataattattgattccacggaagaactaccaacagttactccaattacaacaacatatgaaccttctacatataattatactatcgatgatagcactgttattactactgaagaactacaagtgactcctcatatggatctccatcgatgatacatgtattaaaatactttccgaataagtcttttaaatattgtattaattatgaaaaactatgctatgcgagtatgatgcaaagatgtttaatgatacgatactagattttatctctagcgagagatgtcgttagaatcatttatcataactacgtttaataataattcatcaacgaatatcgataacatgtgtcatttatacgttaaagtctgtccgtcttctctattgtttagactgtttgtagaatgctgtgatataaacaaactagtagaaggtacgactccgttacactgttatctaatgaatgaaggatttgaatcatctgttttaaaaaacctattaaaggagtatgtcatgaatacgtttaatgttcatgacatccattacacaaatatttaactcatgatgaagttgagaatgatatgctttctgatagtatagatagctttagctaatataaaaatatattaatccactatatattctagacttgatttaaaaccgataaactactactacgtactgtataagttgttaaaaaaaggagcagaccctaattatgtagatgatagaggtaatacttttcttcattacttctgcatctatatgtccacttatgagaaaacgtcatttaataagatgcatcgtgaaaagaaatttattaaagagttggtaaaatatgaaaccgaaagtaaataatataggaaatacacctctacataactacgtatctcaatatgatatcactctcattcctcatccacaacccattaaaaaaatggaaattaaagccctctattagcataaacggctacaggtctacctttacaatggcctctccttgtgcccagttcagaccctgtcattgccacgctactaaggactccctgaataccgtggccgacgtcagacattgtctgactgaatacatcctgtgggtttctcatagatggacccatagagaaagcgcagggtctctctacaggcttctcatctctttcagaactgatgcaacggagctctttggtggtgagttgaaggattcacttccgtgggacaatatcgacaattgcgtggagatcattaaatgtttcatcagaaatgactccatgaaaaccgccgaagaacttcgtgcaatcattggactttgtactcaatcagctatcgtctctggaagagtcttcaacgataagtatatcgacatactacttatgctgcgaaagattctgaacgagaacgactatctcaccctcttggatcatatccgcactgctaaatactaaatctccttcatgctctctcactacactttttatcatcttatgaggaatgattgccttcatcatttttcgtgaaataggaataattagcaccagaatagctatggattgcacatgtattctatgtcgtctactggatgaagatgtgacgtacaaaaaaataaaactagaaattgaaacgtgtcacaacttatcaaaacatatagatagacgaggaaacaatgcgctacattgttacgtcttcaataaatgcgatacagacattaagattgttcgactgttactctctcgcggagtcgagagactttgtagaaacaacgaaggattaactccgctaggagcatacagtaagcatagatacgtaaaatctcaaattgtgcatctactgatatccagctattcgaattcctctaacgaactcaagtcgaatataaatgatttcgatctgtattcgtatatgtcttcggataatatcgacttacgtctgctaaaatacctaattgtggataaacggatacgtccgtccaagaatacgaattatgcaatcaatggtctcggattggtggatatatacgtaacgacgcctaatccgagaccagaagtattgctatggcttcttaaatcagaatgttacagcaccggttacgtatttcgtacctgtatgtacgacagtgatatgtgtaagaactctcttcattactatatatcgtctcatagagaatctcaatctctatccaaggatgtaattaaatgtttgatcaataacaatgtttccatccatggcagagacgaaggaggatctttacccatccaatactactggtcttgctcaaccatagatatagagattgttaaattattaataaaggatgtggacacgtgtagagtatacgacgtcagccctatattagaggcggattatctaaacaagcgatttagagtaaccccatataatgtagacatggaaatcgttaatcttcttattgagagacgtcatactcttgtcgacgtaatgcgtagtattacttcttacgattccagagactataaccactacatcatcgataacattctaaagagatttagacaacaggatgaatccatcgtacaagccatgttgataaactacttacattacggcgatatggtcgttcgatgcatgttagataacggacaacaactatcctctgcacgactactttgttaataataatctcgtcgatgtaaacgtcgtaaggtttatcgtggaaaataatggacacatggctgtaaatcacgtatcgaacaatggccgtctatgtatgtacggtctgatattatcgagatttaataattgcgggtatcactgttatgaaaccatactaatagatgtatttgatatactaagcaagtacatggataatatagatatgatcgataatgagaataaaactctactatattacgcggtcgatgtcaataatatacaatttgcaaagcggttattggaatatggagcgagtgttacaacatcacgctcgataatcaatacggccatccagaaaagtagttacagaagagaaaacaaaacgaggatagttgatttattacttagctaccatcccactctagagactatgattgacgcatttaatagagatatacgctatctatatcctgaaccattattcgcctgtatcagatacgccttaatcctagatgatgattttccttctaaagtaagtatgatatctccggtcgtcataaggaactaaagcgctatagagtagacattaatagaatgaagaatgcctacatatcaggcgtctccatgtttgatatattatttaaacgaagcaaacgccacagattgagatacgcaaagaatccgacatcaaatggtacaaaaaagaactaacgtccatcattacagaaactgtaaagaacaatgagaggatcgactccatagtggacaacattaatacagacgataacttgatttcgaaattacccatggagatactttattactccattaaataatttatcatggagcgataatgtcctgtttcatttgtttccatgacatattacaaaatcgattccgtccaagatgataaaaacatttaccggcatcataaacacggagtttattttatatgtctcgcataaacattactaaaaaaatatattgttcggttttctttcacatctttaattatgaaaaagtaaatcattatgagatggacgagattgtacgcatcgttcgcgacagtatgtggtacatacctaacgtatttatggacgacggtaagaatgaaggtcacgtttctgtcaacaatgtttgtcatatgtattttacgttctttgatgtggatacatcgtctcatctgtttaagctagttattaaacactgcgatctgaataaacgaggtaactctccattacattgctatacgatgaatacacgatttaatccatctgtattaaagatattgttacaccacggcatgcgtaactttgatagcaaggatgaaaaaggacatattcctctacaccactatctgattcattcactatcaatcgataacaagatctttgatatactaacggacaccattgatgactttagtaaatcatccgatctattgctgtgttatcttagatataaattcaatgggagcttaaactattacgttctgtacaaaggatccgaccctaattgcgtcgacgaggatggactcacttctcttcattactactgtaaacacatatccacgttctacaaaagcaattattacaagttaagtcacactaagatgcgagccgagaagcgattcatctacgcgataatagattatggagcaaacattaacgcggttacacacttaccttcaacagtataccaaacatagtcctcgtgtggtgtatgctcttttatctcgaggagccgatacgaggatacgtaataatcttgattgtacacccatcatggaacgattgtgcaacaggtcatattctcataatgttactcaattggcacgaacaaaaggaagaaggacaacatctactttatctattcataaaacataatcaaggatacactctcaatatactacggtatctactagataggttcgacattcagaaagacgaatactataataccgcctttcaaaattgtaacaacaatgttgcctcatacatcggatacgacatcaaccttccgactaaagacggtattcgacttggtgtttgaaaacagaaacatcatatacaaggcggatgttgtgaatgacatcatccaccacagactgaaagtatctctacctatgattaaatcgttgttctacaagatgtcagaattctctccctacgacgattactacgtaaaaaagatactagcctactgcctattaagggacgagtcattcgcggaactacatagtaaattctgtttaaacgaggactataaaagtgtatttatgaaaaatatatcattcgataagatagattccatcatcgtgacataagtcgccttaaagagattcgaatctccgacaccgacctgtatacggtatcacagctatcttaaagccatacattcggacagacacatttcatttcccatgtacgacgatctcatagaacagtgccatctatcgatggagcataaaagtaaactcgtcgacaaagcactcaataaattagagtctaccatcggtcaatctagactatcgtatttgcctccggaaattatgcgcaatatcatctaaacagtatgttgtacggaaagaaccattacaaatattatccatgatagaaagaaaatatctatatgattggagaagtaggaaacaggaacaagacgacgattactacattattaaatcatgaagtccgtattatactcgtatatattgtttctctcatgtataataataaacggaagagatatagcaccgcatgcaccatccgatggaaagtgtaaagacaacgaatacaaacgccataatttgtgtccgggaacatacgcttccagattatgcgatagcaagactaacacacgatgtacaccctgtggttcgggtaccttcacatctcgcaataatcatttacccgcttgtctaagttgtaacggaagacgcgatcgtgtaacacgactcacaatagaatctgtgaatgctctcccggatattattgtcttctcaaaggatcatccggatgcaaggcatgtgtttcccaaacaaaatgtggaataggatacggagtatccggagacgtcatctgttctccgtgtggtctcggaacatattctcacaccgtctcttccgcagataaatgcgaacccgtacccagtaatacctttaactatatcgatgtggaaattaatctgtatcccgtcaacgacacgtcgtgtactcggacgaccactaccggtctcagtgaatccatctcaacgtcggaactaactattactatgaatcataaagactgtaatcccgtatttcgtgaggaatacttctctgtccttaataaggtagcaacttcaggtttctttacaggagaaaggtgtgcactctgaatttcgagattaaatgcaataacaaagattcttcctccaaacagttaacgaaagcaaagaatgatgacggtatcatgccgcattcggagacagtaactctagtgggcgactgtatatctagcgtcgacatctatatactatatagtaataccaatactcaagactacgaaactgatacaatctcttatcatgtgggtaatgttctcgatgtcgatagccatatgcccggtagttgcgatatacataaactgatcactaattccaaacccacccgctttttatagtaagtttttcacccataaataataaatacaataattaatttctcgtaaaagtagaaaatatattctaatttattgcatggtaaggaagtagaatcataaagaacagtactcaatcaatagcaattatgaaacaatatatcgtcctggcatgcatgtgcctgccagtcttcagcaatcatcctcatcctcatcctcgtgtacggaagaagaaaacaaacatcatatgggaatcgatgttattatcaaagtcacaaagcaagaccaaacaccgaccaatgataagatttgccaatccgtaacggaaattacagagtccgagtcagatccaaatcccgaggtggaatcagaagatgattccacatcagtcgaggatgtagatcctcctaccacttattactccatcatcggtggaggtctgagaatgaactttggattcaccaaatgtcctcagattaaatccatctcagaatccgctgatggaaacacagtgaatgctagattgtccagcgtgtccccaggacaaggtaaggactctcccgcgatcactcatgaagaagctcttgctatgatcaaagactgtgaggtgtctatcgacatcagatgtagcgaagaagagaaagacagcgacatcaagacccatccagtactcgggtctaacatctctcataagaaagtgagttacgaagatatcatcggttcaacgatcgtcgatacaaaatgtgtcaagaatctagagtttagcgttcgtatcggagacatgtgcaaggaatcatctgaacttgaggtcaaggatggattcaagtatgtcgacggatcggcatctgaaggtgcaaccgatgatacttcactcatcgattcaacaaaactcaaagcgtgtgtctgaatcgataactctattcatctgaaattggatgagtagggttaatcgaacgattcaggcacaccacgaattaaaaaagtgtaccggacactatattccggtttgcaaaacaaaaatgttcttaactacattcacaaaaagttacctctcgcgacttcttctttttctgtctcaatagtgtgatacgattatgacactattcctattcctattcctatttcctttcagggtatcacaaaaatattaaacctctttctgatggtctcataaaaaaagttttacaaaaatatttttattctctttctctctttgatggtctcataaaaaaagttttacaaaaatatttttattctctttctctctttgat

SEQ ID NO: 90 - DNA, 200008 bp, Vaccinia virus
  source 1..200008: mol_type = genomic DNA
  misc_feature 1..200008: note = VIR115
atcaaagagagaaagagaataaaaatatttttgtaaaactttttttatgagaccatcaaagagagaaagagaataaaaatatttttgtaaaactttttttatgagaccatcagaaagaggtttaatatttttgtgataccctgaaaggaaataggaataggaataggaatagtgtcataatcgtatcacactattgagacagaaaaagaagaagtcgcgagaggtaactttttgtgaatgtagttaagaacatttttgttttgcaaaccggaatatagtgtccggtacacttttttaattcgtggtgtgcctgaatcgttcgattaaccctactcatccaatttcagatgaatagagttatcgattcagacacacgctttgagttttgttgaatcgatgagtgaagtatcatcggttgcaccttcagatgccgatccgtcgacatacttgaatccatccttgacctcaagttcagatgattccttgcacatgtctccgatacgaacgctaaactctagattcttgacacattttgtatcgacgatcgttgaaccgatgatatcttcgtaactcactttcttatgagagatgttagacccgagtactggatgggtcttgatgtcgctgtctttctcttcttcgctacatctgatgtcgatagacacctcacagtctttgatcatagcaagagcttcttcatgagtgatcgcgggagagtccttaccttgtcctggggacacgctggacaatctagcattcactgtgtttccatcagcggattctgagatggatttaatctgaggacatttggtgaatccaaagttcattctcagacctccaccgatgatggagtaataagtggtaggaggatctacatcctcgactgatgtggaatcatcttctgattccacctcgggatttggatctgactcggactctgtaatttccgttacggattggcaaatcttatcattggtcggtgtttggtcttgctttgtgactttgataataacatcgattcccatatgatgtttgttttcttcttccgtacacgaggatgaggatgaggatgattgctgaagactggcaggcacatgcatgccaggacgatatattgtttcataattgctattgattgagtactgttctttatgattctacttccttaccatgcaataaattagaatatattttctacttttacgagaaattaattattgtatttattatttatgggtgaaaaacttactataaaaagcgggtgggtttggaattagtgatcagtttatgtatatcgcaactaccgggcatatggctatcgacatcgagaacattacccacatgataagagattgtatcagtttcgtagtcttgagtattggtattactatatagtatatagatgtcgacgctagatatacagtcgcccactagagttactgtctccgaatgcggcatgataccgtcatcattctttgctttcgttaactgtttggaggaagaatctttgttattgcatttaatctcgaaattcagagtgcacacctttctcctgtaaagaaacctgaagttgctaccttattaaggacagagaagtattcctcacgaaatacgggattacagtctttatgattcatagtaatagttagttccgacgttgagatggattcactgagaccggtagtggtcgtccgagtacacgacgtgtcgttgacgggatacagattaatttccacatcgatatagttaaaggtattactgggtacgggttcgcatttatctgcggaagagacggtgtgagaatatgttccgagaccacacggagaacagatgacgtctccggatactccgtatcctattccacattttgtttgggaaacacatgccttgcatccggatgatcctttgagaagacaataatatccgggagagcattcacagattctattgtgagtcgtgttacacgatcgcgtcttccgttacaacttagacaagcgggtaaatgattattgcgagatgtgaaggtacccgaaccacagggtgtacatcgtgtgttagtcttgctatcgcataatctggaagcgtatgttcccggacacaaattatggcgtttgtattcgttgtctttacactttccatcggatggtgcatgcggtgctatatctcttccgtttattattatacatgagagaaacaatatatacgagtataatacggacttcatgatttaataatgtagtaatcgtcgtcttgttcctgtttcctacttctccaatcatatagatattttctttctatcatggataatatttgtaatggttctttccgtacaacatactgtttagatgatattgcgcataatttccggaggcaaatacgatagtctagattgaccgatggtagactctaatttattgagtgctttgtcgacgagtttacttttatgctccatcgatagatggcactgttctatgagatcgtcgtacatgggaaatgaaatgtgtctgtccgaatgtatggctttaagatagctgtgataccgtatacaggtcggtgtcggagattcgaatctctttaaggcgacttatgtcacgatgatggaatctatcttatcgaatgatatatttttcataaatacacttttatagtcctcgtttaaacagaatttactatgtagttccgcgaatgactcgtcccttaataggcagtaggctagtatcttttttacgtagtaatcgtcgtagggagagaattctgacatcttgtagaacaacgatttaatcataggtagagatactttcagtctgtggtggatgatgtcattcacaacatccgccttgtatatgatgtttctgttttcaaacaccaagtcgaataccgtctttagtcggaaggttgatgtcgtatccgatgtatgaggcaacattgttgttacaattttgaaaggcggtattatagtattcgtctttctgaatgtcgaacctatctagtagataccgtagtatattgagagtgtatccttgattatgttttatgaatagataaagtagatgttgtccttcttccttttgttcgtgccaattgagtaacattatgagaatatgacctgttgcacaatcgttccatgatgggtgtacaatcaagattattacgtatcctcgtatcggctcctcgagataaaagagcatacaccacacgaggactatgtttggtatactgttgaaggtaagtgtgtaaccgcgttaatgtttgctccataatctattatcgcgtagatgaatcgcttctcggctcgcatcttagtgtgacttaacttgtaataattgcttttgtagaacgtggatatgtgtttacagtagtaatgaagagaagtgagtccatcctcgtcgacgcaattagggtcggatcctttgtacagaacgtaatagtttaagctcccattgaatttatatctaagataacacagcaatagatcggatgatttactaaagtcatcaatggtgtccgttagtatatcaaagatcttgttatcgattgatagtgaatgaatcagatagtggtgtagaggaatatgtcctttttcatccttgctatcaaagttacgcatgccgtggtgtaacaatatctttaatacagatggattaaatcgtgtattcatcgtatagcaatgtaatggagagttacctcgtttattcagatcgcagtgtttaataactagcttaaacagatgagacgatgtatccacatcaaagaacgtaaaatacatatgacaaacattgttgacagaaacgtgaccttcattcttaccgtcgtccataaatacgttaggtatgtaccacatactgtcgcgaacgatgcgtacaatctcgtccatctcataatgatttactttttcataattaaagatgtgaaagaaaaccgaacaatatatttttttagtaatgtttatgcgagacatataaaataaactccgtgtttatgatgccggtaaatgtttttatcatcttggacggaatcgattttgtaatatgtcatggaaacaaatgaaacaggacattatcgctccatgataaattatttaatggagtaataaagtatctccatgggtaatttcgaaatcaagttatcgtctgtattaatgttgtccactatggagtcgatcctctcattgttctttacagtttctgtaatgatggacgttagttcttttttgtaccatttgatgtcggattctttgcgtatctcaatctgtggcgtttgcttcgtttaaataatatatcaaacatggagacgcctgatatgtaggcattcttcattctattaatgtctactctatagcgctttagttccttatgacgaccggagatatcatacttactttagaaggaaaatcatcatctaggattaaggcgtatctgatacaggcgaataatggttcaggatatagatagcgtatatctctattaaatgcgtcaatcatagtctctagagtgggatggtagctaagtaataaatcaactatcctcgttttgttttctcttctgtaactacttttctggatggccgtattgattatcgagcgtgatgttgtaacactcgctccatattccaataaccgctttgcaaattgtatattattgacatcgaccgcgtaatatagtagagttttattctcattatcgatcatatctatattatccatgtacttgcttagtatatcaaatacatctattagtatggtttcataacagtgatacccgcaattattaaatctcgataatatcagaccgtacatacatagacggccattgttcgatacgtgatttacagccatgtgtccattattttccacgataaaccttacgacgtttacatcgacgagattattattaacaaagtagtcgtgcagaggatagttgttgtccgttatctaacatgcatcgaacgaccatatcgccgtaatgtaagtagtttatcaacatggcttgtacgatggattcatcctgttgtctaaatctctttagaatgttatcgatgatgtagtggttatagtctctggaatcgtaagaagtaatactacgcattacgtcgacaagagtatgacgtctctcaataagaagattaacgatttccatgtctacattatatggggttactctaaatcgcttgtttagataatccgcctctaatatagggctgacgtcgtatactctacacgtgtccacatcctttattaataatttaacaatctctatatctatggttgagcaagaccagtagtattggatgggtaaagatcctccttcgtctctgccatggatggaaacattgttattgatcaaacatttaattacatccttggatagagattgagattctctatgagacgatatatagtaatgaagagagttcttacacatatcactgtcgtacatacaggtacgaaatacgtaaccggtgctgtaacattctgatttaagaagccatagcaatacttctggtctcggattaggcgtcgttacgtatatatccaccaatccgagaccattgattgcataattcgtattcttggacggacgtatccgtttatccacaattaggtattttagcagacgtaagtcgatattatccgaagacatatacgaatacagatcgaaatcatttatattcgacttgagttcgttagaggaattcgaatagctggatatcagtagatgcacaatttgagattttacgtatctatgcttactgtatgctcctagcggagttaatccttcgttgtttctacaaagtctctcgactccgcgagagagtaacagtcgaacaatcttaatgtctgtatcgcatttattgaagacgtaacaatgtagcgcattgtttcctcgtctatctatatgttttgataagttgtgacacgtttcaatttctagttttatttttttgtacgtcacatcttcatccagtagacgacatagaatacatgtgcaatccatagctattctggtgctaattattcctatttcacgaaaaatgatgaaggcaatcattcctcataagatgataaaaagtgtagtgagagagcatgaaggagatttagtatttagcagtgcggatatgatccaagagggtgagatagtcgttctcgttcagaatctttcgcagcataagtagtatgtcgatatacttatcgttgaagactcttccagagacgatagctgattgagtacaaagtccaatgattgcacgaagttcttcggcggttttcatggagtcatttctgatgaaacatttaatgatctccacgcaattgtcgatattgtcccacggaagtgaatccttcaactcaccaccaaagagctccgttgcatcagttctgaaagagatgagaagcctgtagagagaccctgcgctttctctatgggtccatctatgagaaacccacaggatgtattcagtcagacaatgtctgacgtcggccacggtattcagggagtccttagtagcgtggcaatgacagggtctgaactgggcacaaggagaggccattgtaaaggtagacctgtagccgtttatgctaatagagggctttaatttccatttttttaatgggttgtggatgaggaatgagagtgatatcatattgagatacgtagttatgtagaggtgtatttcctatattatttactttcggtttcatattttaccaactctttaataaatttcttttcacgatgcatcttattaaatgacgttttctcataagtggacatatagatgcagaagtaatgaagaaaagtattacctctatcatctacataattagggtctgctcctttttttaacaacttatacagtacgtagtagtagtttatcggttttaaatcaagtctagaatatatagtggattaatatatttttatattagctaaagctatctatactatcagaaagcatatcattctcaacttcatcatgagttaaatatttgtgtaatggatgtcatgaacattaaacgtattcatgacatactcctttaataggttttttaaaacagatgattcaaatccttcattcattagataacagtgtaacggagtcgtaccttctactagtttgtttatatcacagcattctacaaacagtctaaacaatagagaagacggacagactttaacgtataaatgacacatgttatcgatattcgttgatgaattattattaaacgtagttatgataaatgattctaacgacatctctcgctagagataaaatctagtatcgtatcattaaacatctttgcatcatactcgcatagcatagtttttcataattaatacaatatttaaaagacttattcggaaagtattttaatacatgtatcatcgatggagatccatatgaggagtcacttgtagttcttcagtagtaataacagtgctatcatcgatagtataattatatgtagaaggttcatatgttgttgtaattggagtaactgttggtagttcttccgtggaatcaataattatactaacagcaatagtataattatataaatatgttccgttgatatcacatattttaatgaactcatttctaacaccctcagctatatctgtccaattaaatgtagccaacaatctactacgttctctttgattgactacttgtacggtagcgacgctacactatctttattgtcttctacatgctccaattgaatgtcatgatacaacgcagtttttcttatgcatgtttcataacaccacgaacatgtcgcagtaagatatatagccagagataatttctgtaaattcatgattgccggtcataaacaagcccgtcaataattgtggctatatattcagtttatagagcaaaataattaagcacaatagcgcttaatctcaaaatatgttatgtttatttttttcatattaaacatactggttaaaatcctctaaaggctgatcttcatctataaatcaagatcataattacatttagacagtggtttcatgtttataaaaatgttctttttgtgtgaataaggaatatactaatcaataatcaaccatcgaccccattacgatagtatgcaggcaaccccccattagagaggtacgtgtaatcagtctctccagttttagtatttttataagtcattgttacataaacggcttttaaacagtctcctcgataataagccatatctggaaatttattaaatactcgagtcattttacgcacggtcaaaaaagtaagtaatgtcgacgacttcttacattctatagaaacacctagaatactcattttcttttggaaaatatcctcagactctgatttgaacaatgcacgacctatagtaaaccgtgaccaataagttatattagtcaatggtatatccaaaccatcaggtgtggatagtacgccgatagtccagtctttggtatcgatagtgtagttattgaactgagaagttaccgtatagtctttttggtcatctctaaacaaggaaactaatacctctacactattgaacgatttatcttccgtaatgggtggaataacgggaatataaagtggactagcgatggatgaagtcacgaatataagacacgctattaatccgtatatcatcattttgatattacttataataacgatttgtttaatttttagtttatactattaattgtaaatgatattattatttttttaagtattatcagctttagtttatactattactatttgtaatatttagacatagataaacgtgataaaagtctatttgtttatatttattgcggatagcagtatttccctataaaaagtatacgtcctgtgttgtctttaatcatgtacatgaatggatggtttatgtagaccttcgtacgatataccatcgaaaagttagtcataaatactcctgtaacggccgatgcttctgtatactcctcattaacatctataaacgtcgtatgtagaaatttttctacagtgatagtttcattacacatcttgctaaaatctgcataatatccgaatatattagtaagtcctaaattttctaaaatcggtaccagattatacggttctgtcatttccactttaaactttggcatatacaagtctatacttttagtagataacataccacaccattttttaaatttttcatctgttatatttttttctatgttatatataccttctatgtcgtccggtagtataattaccatactagagtttccctcgtatggaatatcgataatagagaatcctccgaataattcattaatatgtacatattgcaagttattctcggtacccaccatcatatcaacactggtaactatattcttagaaatataaaacttgtctgtatatgtaagatgtttagaaaatggatatttccacattgctttaaaatggacggcgctaacaactgtcatacgagtattaatggatagcggactagtcaataaggaattaattttaccatttgtcatcgtcttaacccattcgttgattagttcctttgtttggttagcattattaaagtttacagtttgaaaatcgtcttttattttttgtaggaaggaggcgtggaactcgatactatcgctaccgtatattttatttgcggtagctagtgtcgcacaatacggaatatctacgtccatgtcattattgtcatccttcttatcatcgggtgtattctcattcatattctctatatattttgatagttgttcagctgtagaaccagctgctccatgatttagaatagataaagtagataaaatagaaactggagaaatcaaaacattttcatcagggtgttttaagattagttctttaaagatatccatggtatagaccaaacaataacgataacgatatatatcataaataaataatgttaaatttcagtttatgtttgtaccccgtattcatacttaacaaattggtattgcgtacacaatcaatcatattacataccattaataatgcaagcataaaaaatcgttagtagatgtttctaaatataggttccgtaagcaaagaatataagaatgaagcggtaatgataaaatcaatcgttatctaaaatgatcatactcatttattttattctattatattaacacatacatttttaacagcaacacattcaatattgtattgttatttttatattatttacacaattaacaatatattattagtttatattactgaattaataatataaaattcccaatcttgtcataaacacacactgagaaacagcataaacacaaaatccatcaaaaatgtcgatgaaatatctgatgttgttgttcgctgctatgataatcagatcattcgccgatagtggtaacgctatcgaaacgacattgccagaaattacaaacgctacaacagatattccagctatcagattatgcggtccagagggagatggatattgtttacacggtgactgtatccacgctagagatatcgacggtatgtattgtagatgctctcatggttatacaggcattagatgtcagcatgtagtattagtagactatcaacgttcagaaaaaccaaacactacaacgtcatatatcccatctcccggtattgtgcttgtattagtaggcattattattatgtgttgtctattatctgtttataggttcactcgaagaactaataaactacctctacaagatatggttgtgccataatttttataaatttttttatgagtatttttacaaaaaaaatgtataaagtgtatgtcttatgtatatttataaaaatgctaagtatgcgatgtatctatgttatttgtatttatctaaacaatacctctacctctagatattatacaaaaattttttatttcggcatattaaagtaaaatctagttaccttgaaaatgaatacagtgggtggttccgtatcaccagtaagaacataatagtcgaatacagtatccgattgagattttgcatacaatactagtctagaaagaaatttgtaatcattttctgtgacgggagtccatatatctgtatcatcgtctagtttatcagtgtcccatgctatatttctgttatcatcattagttaatgaaaataactctcgtgcttcagaaaagtcaaatattgtatccatacatacatctccaaaactatcgcttatacgtttatctttaacgatacctatacctagatggttatttactaacagacattttccagatctattgactataactcctatagtttccacatcaaccaagtaatgatcatctattgttatataacaataacataactcttttccatttttatcagtatgtatatctatatcaacgtcgtcgttgtagtgaatagtagtcattgatctattatatgaaacggatatgtctagaacggcaattgtcttacgtccagttaacactttcgttgatttaaagtctagagtctttgcaaacataatatccttatccgactttatatttcctgtagggtggtataattttattttgcctccacatatcggtgtttccaaatatattactagacaatattccatatagttattagttaagggtacccaattagaacacgtacgcttattatcatcatttggatcgtatttcataaaagttattgtactatcgatgtcaacacattctacattttttaatcgtctatatagtatttttctgatattttctataatatcagaattgtcttccatcggaagttgtatactatcggaatcagttacatgtttaaataattctctgatgtcattccttatacaatcaaattcattattaaacagtttaatagtctgtagacctttatcgtcgtaaatatccattgtcttattagttacgcttatttttatgtgttttacgttgctttattatattttataagaatgattgtttgacgaatcacgagaactattaagacacattattaggtatatattataaaaaagtttttgattacgatgttataagaggaaagaggacacattaacatcatacatcaattaactacattcttataacatcgtaatcaaaagaattgcaattttgatgtataacaactgtcaatgggttatggaattgtatattacatattatacggtatgttggtaacgacaaataccgatcggtaatcgtttgccggtgtaatagaattatatatatctatctattacaccggctgagtatacataataataagttgtggtagtatgatctccatatttataatttaggactttgtattcagtatttttggaatcataaaaaataaaaaaaagttttactaatttaaaatttaaaaagtatttacatttttttcactgtttagtcgcggatatggaattcgatcctgccaaaatcaatacatcatctatagatcatgtaacaatattacaatacatagatgaaccaaatgatataagactaacagtatgcattatccgaaatattaataacattacatattatatcaatatcacaaaaataaatacacatttggctaatcaatttcgggcttggaaaaaacgtatcgccggaagggactatatgactaacttatctagagatacaggaatacaacaatcaaaacttactgaaactatacgtaactgtcaaaaaaatagaaacatatatggtctatatatacactacaatttagttattaatgtggttattgattggataaccgatgtgattgttcaatcaatattaagagggttggtaaattggtacatagctaataatacctatactccaaatacacccaataatacaacaaccatttctgagttggatatcatcaaaatactaaataaatacgaggacgtgtatagagtaagtaaagaaaaagaatgtggaatttgctatgaagttgtttactcaaaacgattagaaaacgatagatactttggtttattggattcgtgtactcatatattttgcataacatgcatcaatatatggcataaaacacgaagagaaaccggtgcgtcggataattgtcctatatgtcgtacccgttttagaaacataacaatgagcaagttctataagctagttaactaataaataaaaagtttaatttgttgacgacgtatgtcgttattttttctcgtataaaagattaatttgattctaatataatctttagtattggataaatatcaattcaaattaattccattagattatatcataaataaaaatagtagcacgcactacttcagccaaatattcttttttgaaacgccatctatcgtagtgaggacacaagtgaacctataatgagcaaatttattagtatcggttacatgaaggactttacgtagagtggtgattccactatctgtggtacgaacggtttcatcttctttgatgccatcacccagatgttctataaacttggtatcctcgtccgatttcatatcctttgccaaccaatacatatagctaaactcaggcatatgttccacacatcctgaacaatgaaattctccagaagatgttacaatgtctagatttggacatttggtttcaaccgcgttaacatatgagtgaacacacccatacatgaaagcgatgagaaataggattttcatcttgccaaaatatcactagaaaaaatttatttatcaattttaaaggtataaaaaatacttattgttgctcgaatattttgtatttgatggtatacggaagattagaaatgtaggtattatcatcaactgattctatggttttatgtattctatcatgtttcactattgcgttggaaataatatcatatgcttccacatatattttattttgttttaactcataatactcacgtaattctggattattggcatatctgtgaataattttagctccatgatcagtaaatattaatgagaacatagtattaccacctaccattatttttttcatttcgttcaattcttgattgcaaagatctatataatcattatagcgttgacttatggactctggaatcttagacgatgtacagtcatctataatcatggcatatttaatacattgttttatagcatagtagttatctacgatgttagatatttctctcaatgaatcaatcacacaatctaatgtaggtttatgacataatagcattttcagcagttcaatgtttctagattcgttgatggcaatggctatacatgtatatccgttatttgatctaatgttgacatctgaaccggattctagcagtaaagatactagagattgtttattatatctaacagccttgtgaagaagtgtttctcctcgtttgtcaatcatgttaatgtctttaagataaggtaggcaaatgtttatagtactaagaattgggcaagcataagacatgtcacaaagaccctttttgtatgtataagtgtagaaattataacatccatagttggatttacataggtgtccaatcgggatctctccatcatcgagatgattgacggcatctcccccttccttttttagtagatatttcatcgtgtaagaatcaatattaatatttctaaagtatccgtgtatagcctctttatttaccacagctccatattccaacatgcattccactaaagggatatcgatatcgccgaatgtcatatactcaattagtatatgttggaggacatccgagttcattgttttcaatatcaaagagatggtttccttatcatttctccatagtggtacaatactacacattattccgtgaggctttccattctccaaaaacaatttgaccaaatctacatctttattgtatctataatcactatttagataatcagccataattcctcgagtgcaacatgttagatcgtctatatatgaataagccgtgttatctattcctttcattaacaatttaacgatgtctatatctatatgagatgacttaatataatattgaagagctgtacaatagtttttatctatagaagacggcttgattccgtgattaattagacatttaacaacttccggacgcacatatgctctcgtatccgactctgaatacagatgagagatgatatacagatgcaatacggtaccgcaatttcgtagttgataatcatcatacgcgtatccgtactcgtcctcataaagaacactgcagccattttctatgaacaaatcaataattttaggaacaggatcattgtcattacataattttctataactgaacgatggttttcacatttaacactcaagtcaaatccatgttctaccaacacctttatcaagtcaacgtctacatttttggatttcatatagctgaatatattaaagtcatttatgttgctaaatccagtggcttctagtagagccatcgctatatcctttaactttaacatgtctactatttgtgtattcttctaatggggtagctgtctccaatttttgcgtaatggattagtgccactgtctagtagtagtttgacgacctcgacattattacaatgctcattaaaaaggtatgcgtgtaaagcattattcttgaattggttcctggtatcattaggatctctgtctctcaacatctgtttaagttcatcgagagccacctcctcattttccaaatagtcaaacattttgactgaatagaagtgaatgagctactgtgaactctatacacccacacaactaatgtcattaaatattatttttttgaatgtatttataccatgtcaaaaacttgtacaattattaataaaaataatttagtgtttaaattttaccagttccagattttacacctccgttaaccccactttttacaccactggacgaccctcctccccacattccaccgccaccagatgtataagttttagatcctttattactaccatcatgtccatggataaagacactccacatgccgccactaccccctttagaagacatattaataagacttaagagttaaggacaagtttaacaataaaattaatcacgagtaccctactaccaacctacactattatatgattatagtttctatttttacagtaccttaactaaagtttctagtcacaagagcaatactaccaacctacactattatatgattatagtttctatttttataggaacgcgtacgagaaaatcaaatgtctaatttctaacggtagtgttgataaacgattatcgtcaatggatacctcctctatcatgtcgtctattttcttactttgttctattaacttattagcattatatattatttgattataaaacttatattgcttattagcccaatctgtaaatatcggattattaacatatcgtttctttgtaggtttatttaacttgtacatcactgtaagcatgtccgtaccatttattttaatttgacgcatatccgcaatttctttttcgcagtcggttataaattctatatatgatggatacatgctacatgtgtacttataatcgactaatatgaagtacttgatacatattttcagtaacgatttattattaccacctatgaataagtacctgtgatcgtctaggtaatcaactgttttcttaatacattcgatggttggtaatttactcagaataatttccaatatcttaatatataattctgctatttctggaatatatttatctgccagtataacacaaatagtaatacatgtaaacccatattttgttattatattaatgtctgcgccattatctattaaccattctactaggctgacactatgcgacttaatacaatgataaagtatactacatccatgtttatctattttgtttatatcatcaatatacggcttacaaagttttagtatcgataacacatccaactcacgcatagagaaggtagggaataatggcataatatttattaggttatcatcattgtcattatctacaactaagtttccattttttaaaatatactcgacaactttaggatctctattgccaaatttttgaaaatatttatttatatgcttaaatctatataatgtagctccttcatcaatcatacatttaataacattgatgtatactgtatgataagatacatattctaacaatagatcttgtatagaatctgtatatcttttaagaattgtggatattaggatattattacgtaaactattacacaattctaaaatataaaacgtatcacggtcgaataatagttgatcaactatataattatcgattttgtgatttttcttcctaaactgtttacgtaaatagttagatagaatattcattagttcatgaccactatagttactatcgaataacgcgtcaaatatttcccgtttaatatcgcatttgtcaagataataatagagtgtggtatgttcacgataagtataataacgcatctctttttcgtgtgaaattaaatagtttatcacgtccaaagatgtagcataaccatcttgtgacctagtaataatataataatagagaactgttttacccattctatcatcataatcagtggtgtagtcgtaatcgtaatcgtctaattcatcatcccaattataatattcaccagcacgtctaatctgttctattttgatcttgtatccatactgtatgttgctacatgtaggtattcctttatccaataatagtttaaacacatctacattgggatttgatgttgtagcgtatttctctacaatattaataccatttttgatactatttatttctatacctttcgaaattagtaatttcaataagtctatatcgatgttatcagaacatagatattcgaatatatcaaaatcattgatatttttatagtcgactgacgacaataacaaaatcacaacatcgtttttgatattattatttttcttggtaacgtatgcctttaatggagtttcaccatcatactcatataatggatttgcaccactttctatcaatgattgtgcactgctggcatcgatgttaaatgttttacaactatcatagagtatcttatcgttaaccatgattggttgttgatgctatcgcattttttggtttctttcatttcagttatgtatggatttagcacgtttgggaagcataagctcatatgatttcagtactgtagtgtcagtactattagtttcgatcagatcaatgtctagatctatagaatcaaaacacgataggtcagaagataatgaatatctgtaggcttcttgttgtactgtaacttctcgttttgttagatggttgcatcgtgctttaacatcaatggtacaaattttatcctcgctttgtgtatcatattcgtccctactataaaattgtatattcagattatcatgagatgtgtatacgctaacggtatcaataaacggagcacaccatttagtcataaccgtaatccaaaaatttttaaagtatatcttaacgaaagaagttgtgtcattgtctacggtgtatggtactagatcctcataagtgtatatatctagagtaatgtttaatttatcaaatggttgataatatggatcctcatggcaatttcctaagacgaaaataagacataaacacgcaataaatctaattgcggacatggttactccttaaaaaaatactaataatcaccttggctatttagtaagtgtcatttaacactatactcatattaatccatggactcataatctctatacgggattaacggatgttctatatacggggatgagtagttctcttctttaactttatactttttactaatcatatttagactgatgtatgggtaatagtgtttgaagagctcgttctcatcatcagaataaatcaatatctctgtttttttgttatacagatgtattacagcctcatatattacgtaatagaacgtgtcatctaccttattaactttcaccgcatagttgtttgcaaatacggttaatcctttgacctcgtcgatttccgaccaatctgggcgtataatgaatctaaactttaatttcttgtaatcattcgaaataatttttagtttgcatccgtagttatcccctttatgtaactgtaaatttctcaacgcgatatctccattaataatgatgtcgaattcgtgctgtatacccatactgaatggatgaacgaataccgacggcgttaatagtaatttactttttcatctttacatattgggtactagttttactatcataagtttataaattccacaagctactatggaataagccaaccatcttagtataacacacatgtcttaaagtttattaattaattacatgttgttttatatatcgctacgaatttaaacagagaaatcagtttaggaaaaaaaattatctatctacatcatcacgtctctgtattctacgatagagtgctactttaagatgagacatatccgtgtcatcaaaaatatactccattaaaatgattattccggcagcgaacttgatattggatatatcacaacctttgttaatatctacgacaatagacagcagtcccatggttccataaacagtgagtttatctttctttgaagagatattttgtagagatcttataaaactgtcgaatgacatcgcatttatatctttagctaaatcgtatatgttaccatcgtaatatctaaccgcgtctatcttaaacgtttccatcgctttaaagacgtttccgatagatggtctcatttcatcagtcatactgagccaacaaatataatcgtgtataacatctttgatagaatcagactctaaagaaaacgaatcggctttattatacgcattcatgataaacttaatgaaaaatgtttttcgttgtttaagttggatgaatagtatgtcttaataattgttattatttcattaattaatatttagtaacgagtacactctataaaaacgagaatgacataactaatcataactagttatcaaagtgtctaggacgcgtaattttcatatggtatagatcctgtaagcattgtctgtattctggagctattttctctatcgcattagtgagttcagaatatgttataaatttaaatcgaataacgaacataactttagtaaagtcgtctatattaactcttttattttctagccatcgtaataccatgtttaagatagtatattctctagttactacgatctcatcgttgtctagaatatcacatactgaatctacatccaattttagaaattggtctgtgttacatatctcttctatattattgttgatgtattgtcgtagaaaactattacgtagaccattttctttataaaacgaatatatagtactccaattatctttaccgatatatttgcacacataatccattctctcaatcactacatctttaagattttcgttgttaagatatttggctaaactatataattctattagatcatcaacagaatcagtatatatttttctagatccaaagacgaactctttggcgtcctctataatattcccagaaaagatattttcgtgttttagtttatcgagatctgatctgttcatatacgccatgattgtacggtacgttatgataaccgcataaaataaaaatccattttcatttttaaccaatactattcataattgagattgatgtaatactttgttactttgaacgtaaagacagtacacggatccgtatctccaacaagcacgtagtaatcaaatttggtgttgttaaacttcgcaatatttatcaatttagatagaaacttatactcatcatctgttttaggaatccatgtattattaccactttccaacttatcattatcccaggctatgtttcgtccatcatcgttgcgcagagtgaataattcttttgtattcggtagttcaaatatataatccatgcatagatcggtaaagctattgtagatgtgatttttcctaaatctaatataaaactcgtttactagcaaacactttcctgatttatcgaccaagacacatatggtttctaaatctatcaagtggtggggatccatagttatgacgcagtaacatagattattaccttcttaactgtcgctaatatctatatatttattgttatcgtattggattctgcatatagatggcttgtatgtcaaagatatagaacacataaccaatttatagtcgcgctttacattctcgaatctaaagttaagagatttagaaaacattatatcctcggatgatgttatcactgtttctggagtaggatatattaaagtctttacagatttcgtccgattcaaataaatcactaaataatatcccacattatcatctgttagagtagtatcattaaatctattatattttatgaaagatatatcactgctcacctctatatttcgtacatttttaaactgtttgtataatatctctctgatacaatcagatatatctattgtgtcggtagacgataccgttacatttgaattaatggtgttccattttacaacttttaacaagttgaccaattcatttctaatagtatcaaacgctccatgattaaatattttaatagtatccattttatatcactacggacacaaagtagctgacataaaccattgtataatttttatgttttatgtttattagcgtacacattttggaagttccggcttccatgtatttcctggagagcaagtagatgatgaggaaccagataggttatatccgtacttgcacttaaagtttacattgtcgttgtatgagtatgatcttttaaacccgctagacaagtatccgtttgatattgtaggatgtggacatttaacaatctgacacgtgggtggatcggaccattctcctcctgaacacaggacaccagagttaccaatcaacgaatatccactattgcaactataagttacaacgcttccatcggtataaaaatcctcgtatccgttatgtcttccgttggatatagatggaggggattggcatttaacagattcacaaataggtgcctcgggattccataccatagatccagtagatcctaattcacaatacgatttagattcaccgatcaaatgatatccgctattacaagagtacgttatactagagccaaagtctactccgccaatatcaagttggccattatcgatatctcgaggcgatgggcatctccgtttaatacattgattaaagagtgtccatccagtacctgtacatttagcatatataggtcccattttttgctttctgtatccaggtagacatagatattctatagtgtctcctatgttgtaattagcattagcatcagtctccacactattcttaaatttcatattaatgggtcgtgacggaatagtacagcatgatagaacgcatcctattcccaacaatgtcaggaacgtcacgctctccaccttcatatttatttatccgtaaaaatgttatcctggacatcgtacaaataataaaaagcccatatatgttcgctattgtagaaattgtttttcacagttgctcaaaaacgatggcagtgacttatgagttacgttacactttggagtctcatctttagtaaacatatcataatattcgatattacgagttgacatatcgaacaaattccaagtatttgattttggataatattcgtattttgcatctgctataattaagatataatcaccgcaagaacacacgaacatctttcctacatggttaaagtacatgtacaattctatccatttgtcttccttaactatatatttgtatagataattacgagtctcgtgagtaattccagtaattacatagatgtcgccgtcgtactctacagcataaactatactatgatgtctaggcatgggagacttttttatccaacgatttttagtgaaacattccacatcgtttaatactacatatttttcatacgtggtataaactccacccattacatatatatcatcgtttacgaataccgacgcgcctgaatatctaggagtaattaagtttggaagtcttatccatttcgaagtgccgtgtttcaaatattctgccacacccgttgaaatagaaaattctaatcctcctattacatataactttccattgttaacacaagtactaacttctgattttaacgacgacatattagtaaccgttttccattttttcgtttcaagatctacccgcgatacggaataaacatgtctattgttaatcatgccgccaataatgtatagacaattatgtaaaacatttgcattatagaattgtctatctgtattaccgactatcgtccaatattctgttctaggagagtaatgggttattgtggatatataatcagagtttttaatgactactatattatgttttataccatttcgtgtcactggctttgtagatttggatatagttaatcccaacaatgatatagcattgcgcatagtattagtcataaacttgggatgtaaaatgttgatgatatctacatcgtttggatttttatgtatccactttaataatatcatagctgtaacatcctcatgatttacgttaacgtcttcgtgggataagatagttgtcagttcatcctttgataattttccaaattctggatcggatgtcaccgcagtaatattgttgattatttctgacatcgacgcattatatagttttttaattccatatcttttagaaaagttaaacatccttatacaatttgtggaattaatattatgaatcatagtttttacacatagatctactacaggcggaacatcaattattatggcagcaactagtatcatttctacattgtttatggtgatgtttatcttcttccagcgcatatagtctaatagcgattcaaacgcgtgatagtttataccattcaatataatcgcttcatcctttagatggtgatcctgaatgcgtttaaaaaaattatacggagatgccgtaataatttccttattcacttgtataatttccccattgatagaaaatatcacgctttccattcttgaagtactataagtaattatagtataatgtaaaggtttatatattcaatattttttataaaaaaatcatttcgacattaattcctttttaaatttccgtctatcatctatagaaacatattctatgaatttataaaatgcttttacgtgtcctatcgtaggcgatagaaccgctaaaaagcctattgaatttctacaaaagaatctattatatggtatagggagagtataaaacattaaatgcccgtacttattaaagtattcagtagccaatcctaactctttcgaatacttattaatggctcttgttctgtacgaatctatttttttgaacaacggacctagtggtatatcttgttctatgtatctaaaataatgtctgactagatccgttagtttaatatcctcagtcatcttgtctagaatggcaaatctaactgcgggtttaggctttagtttagtttttatatctacatctatgtctttatctaacaccaaaaatataatagctaatattttattacaatcatccggatattcttctacgatctcactaactaatgtttctttggttatactagtatagtcactatcggacaaataaagaaaatcagatgatcgatgaataatacatttaaattcatcatctgtaagatttttgagatgtctcattaaaatattattagggtcagtactcattatcattaggcagctattacttattttattatttttcaccatatagatcaatcattagatcatcaaaatatgtttcaatcatcctaaagagtatggtgaatgactcttcccatctaatttctgaacgttcaccaatgtctctagccactttggcactaatagcgatcattcgcttagcgtcttctatattattaactggttgattcaatctatctagcaatggaccgtcggacagcgtcattctcatgttcttaatcaatgtacatacatcgccgtcatctaccaattcatccaacaacataagctttttaaaatcatcattataataggtttgatcgttgtcatttctccaaagaatatatctaataagtagagtcctcatgcttagtaatttaactattttagttaacaactattttttatgttaaatcaattagtacaccgctatgtttaatacttattcatattttagtttttaggattgagaatcaatacaaaaattaatgcatcattaattttagaaatacttagtttccacgtagttaatgaaacatttgaactcatcgtacaagacgttctcgtacaggacgtaactataaaccggtttatatttgttcaagatagatacaaatccgataactttttttacgaattctacgggatccactttaaaagtgtcataccgggttctttttatttttttaaacagatcaatggtgtgatgttgattaggtcttttacgaatttgatatagaatagcgtttacatattctccataatggtcaatcgccatttgttcgtatgtcataaattctttaattatatgacactgtgtattgtttagttcatccttgttcattgttaggaatctatccaaaatggcaattatactagaactataggtgcgttgtatacacatattgatgtgtctgtttatacaatccatgatatttggatccatgctactaccttcgggtaaaattgtagcatcatataccatttctagtactttaggttcattattatccattgcagaggacgtcatgatcgcatcctaaaaaaatatattatttttatgttattttgttaaaaataatcatcgaatacttcgtaagatactccttcatgaacataatcagttacaaaacgtttatatgaagtaaagtatctacgatttttacaaaagtccggatgcataagtacaaagtacgcgataaacggaataataatagatttatctagtctatctttttctatagctttcatagttagatacatggtctcagaagtaggattatgtaacatcagcttcgataaaatgactgggttatttagtcttacacattcgctcatacatgtatgaccgttaactacagagtctacactaaaatgattgaacaatagatagtctaccattgtttcgtattcagatagtacagcgtagtacatggcatcttcacaaattatatcattgtctaatagatatttgacgcatcttatggatcccacttcaacagccatcttaaaatcggtaaaatcatattgctttcctttatcattaataatttctaaaacatcatctctatcataaaagatacaaatattaactgtttgatccgtaataacattgctagtcgatagcaatttgttaataagatgcgctgggctcaatgtcttaataagaagtgtaagaggactatctccgaatttgttttgtttattaacatccgttgatggaagtaaaagatctataatgtctacattcttgactgttttagagcatacaatatggagaggtgtatttccatcatgatctggttttgagggactaattcctagtttcatcatccatgagattgtagaagcttttggattgtctgacataagatgtctatgaatatgatttttgccaaatttatccactatcctggcttcgaatccgatggacattatttttttaaacactctttctgaaggatctgtacacgccaacaacggaccacatccttcttcatcaaccgagttgttaatcttggctccatactgtaccaataaatttattctctctatgacttcatcatctgttcccgagagataatatagaggcgttttatgctgtttatcacacgcgtttggatctgcgccgtgcgtcagcagcatcgcgactattctattattattaattttagaagctatatgcaatggataatttccatcatcatccgtctcatttggagagtatcctctatgaagaagttcttcgacaaatcgttcatctagtcctttaattccacaatacgcatgtagaatgtgataattatttccagaaggttcgatagcttgtagcatattcctaaatacatctaaatttttactattatatttggcataaagagatagataatactcggccgacataatgttgtccattgtagtataaaaattaatatttctatttctatttctgtatatttgcaacaatttactctctataacaaatatcataacttagttcttttatgtcaagaaggcactggtttagttcatctataaatgtcacgccataactaccacgcatgctatactcagaattatgataaagatatttatccttggggtgtaggtaatggggattaatctttgttggatcagtctctaagttaacacatgtcacacatgatccatttatagttatatcacacgatgatgatttatgaattgattccggaagatcgctatcgtattttgtggttccacaattcatttccatacatgttattgtcacactaatattatgatgaactttatctagccgctgagtggtaaacaacagaacagatagtttattatctttaccaacaccctcagccgctgccacaaatctctgatccgtatccatgatggtcatgtttatttctagtccgtatccagtcaacactatgttagcatttctgtcgatatagctttcactcatatgacactcaccaataatagtagaattaatgtcgtaatttacaccaatagtgagttcggcggcaaagtaccaataccggtaatcttgtcgaggaggacatatagtattcttgtattctaccgaatacccgagagatgcgatacaaaagagcaagactaatttgtaaaccatcttactcaaaatatgtaacaatagtacgatgcaatgagtaagacaataggaaatctatcttatatacacataattattctatcaattttaccaattagttagtgtaatgttaacaaaaatgtgggagaatctaattagtttttctttacacaattgacgtacatgagtctgagttccttgtttttgctaattatttcatccaatttattattcttgactatatcgagatcttttgtataggagtcagacttgtattcaacatgcttttctataatcattttagctatttcggcatcatccaatagtacattttccagattagcagaatagatattaatgtcgtatttgaacagagcctgtaacatctcaatgtctttattatctatagccaatttaatgtccggaatgaagagaagggaattattggtgtttgtcgacgtcatatagtcgagcaagagaatcatcatatccacgtgtccattttttatagtggtgtgaatacaactaaggagaatagccagatcaaaagtagatggtatttctgaaagaaagtatgatacaatacttacatcattaagcatgacggcatgataaaatgaagttttccatccagttttcccatagaacatcagtctccaatttttcttaacaaacagttttaccgtttgcatgttaccactatcaaccgcataatacaatgcagtgtttcccttgtcatcaaattgtgaatcatccagtccactgaatagcaaaatctttactattttggtatcttccaatgtggctgcctgatgtaatggaaattcattctctagaagatttttcaatgctccagcgttcaacaacgtacatactagacgcacgttattatcagctattgcataatacaaggcactatgtccatggacatccgccttaaatgtatctttactagagagaaagcttttcagctgcttagacttccaagtattaattcgtgacagatccatgtctgaaacgagacgctaattagtgtatattttttcattttttataattttgtcatattgcaccagaattaataatatctctaatagatctgattagtagatacatggctatcgcaaaacaacatatacacatttaataaaaataatatttattaagaaaattcagatttcacgtacccatcaatataaataaaataatgattccttacaccgtacccatattaaggagattccaccttacccataaacaatataaatccagtaatatcatgtctaatgatgaacacaaatggtgtattaaattccagtttttcaggagatgatctcgccgtagctaccataatagtagatgcctctgctacagttccttgttcgtcgacatctatctttgcattctgaaacattttataaatatataatgggtccctagtcatatgtttaaacgacgcattatctggattaaacatactaggagccatcatttcggctatcgacttaatatccctcttattttcgatagaaaatttagggagtttaagattgtacactttattccctaattgaaacgaccaatagtctaattttgcagccgtaatagaatctgtgaaatgggtcatattatcacctattgccaggtacatactaatattagcatccttatacggaaggcgtaccatgtcatattctttgtcatcgattgtgattgtatttccttgcaatttagtaactacgttcatcatgggaaccgttttcgtaccgtacttattagtaaaactagcattgcgtgttttagtgatatcaaacggatattgccatgtacctttaaaatatatagtattaatgattgcccatagagtattattgtcgagcatattagaatctactacattagacataccggatctacgttctactatagaattaattttattaaccgcatctcgtctaaagtttaatctatataggccgaatctatgatattgttgataatacgacggtttaatacacacagtattatctacgaaactttgataagttagatcagtgtacgtatatttagatgttttcagcttagctaatcctgatattaattctgtaaatgctggacccagatctctttttctcaaatccatagtcttcaataattctattctagtattacctgatgcaggcaatagcgacataaacatagaaaacgaatagccaaacggcgagaagacaatattatcatcttgaatatttttatacgctactataccggcattggtaaatccttgcagacgataggtagacgctgaacacgttaacgatagtatcaataacgcaatcatgattttatggtattaataattaaccttatttttatgttcggtataaaaaaattattgatgtctacacatccttttgtaattgacatctatatatccttttgtataatcaactctaatcactttaacttttacagttttccctaccagtttatccctatattcaacatatctatccatatgcatcttaacactctctgccaagatagcttcagagtgaggatagtcaaaaagataaatatatagagcataatccttctcgtatactctgccctttattacatcgcccgcattgggcaacgaataacaaaatgcaagcatcttgttaacgggctcgtaaattgggataaaaattatgtttttatatctattttattcaagagaatattcaggaatttctttttccggttgtatctcgtcgcagtatatatcatttgtacattgtttcatattttttaatagtttacaccttttagtaggactagtatcgtacaattcatagctgtattttgaattccaatcacgcataaaaatatcttccaattgttgacgaagacctaatccatcatccggtgtaatattaatagatgctccacatgtatccgtaaagtaatttcctgtccaatttgaggtacctatataggccgttttatcggttaccatatatttggcatggtttaccctagaatacggaatgggaggatcagcatctggtacaataaatagctttacttctatatctatgtttttagattttagcatagcgatagatcttaaaaagtttctcatgataaacgaagatcgttgccagcaactaatcaatagcttaacggatacttgtctgtctatagcggatcttcttaattcatcttctatataaggccaaaacaaaattttacccgccttcgaataaataatagggataaagttcataacagatacataaacgaatttactcgcatttctaatacatgacaataaagcggttaaatcattggttctttccatagtacatagttgttgcggcgcagaagcaataaatacagagtgtggaacaccacttacgttaatactaagaggatgatctgtattataatacgacggataaaagtttttccaattatatggtagattgttaactccaagataccagtatacctcaaaaatttgagtgagatccgctgccaagttcctattattgaagatcgcaatacccaattctttgacctgagttagtgatctccaatccatgttagcgcttcctaaataaatatgtgtattatcagatatccaaaattttgtatgaagaactcctcctaggatatttgtaatatctatgtatcgtacttcaactccggccatttgtagtctttcaacatcctttaatggtttgttagatttattgacggctactctaactcttactcctcttttgggtaattgtacaatctcgtttaatattatcgtgccgaaattcgtacccacttcatccgataaactccaataaaaagatgatatatctagtgtttttgtggtattggatagaatttccctccacatgttaaatgtagacaaatatactttatcaaattgcatacctataggaatagtctctgtaatcactgcgattgtattatccggattcattttatttgttaaaaaataatcctatatcacttcactctattaaaaatccaagtttctatttctttcatgactgattttttaacttcatccgtttccttatgaagatgatgtttggcaccttcataaatttttatttctctattacaatttgcatgttgcatgaaataatatgcacctaaaacatcgctaatctcattgtttgttccctggagtatgagagtcgggggggtgttaatcttggaaattatttttctaaccttgttggtagccttcaagacctgactagcaaatccagccttaattttttcatgattgattaatgggtcgtattggtatttataaactttatccatatctctagatactgattctggacatagctttccgactggcgcatttggtgtgatggttcccataagtttggcagctagcagattcagttttgaaacagcatctgcattaactagaggagacattagaatcattgctgtaaacaagtttggattatcgtaagaggctagtatagaaattgttgctcccatggaatgacccaataagtagatttaatagttaccacgtgctgtaccaaagtcatcaatcatcattttttcaccattacttcttccatgtccaatatgatcatgtgagaatactaaaattcctaacgatgatatgttttcagctagttcgtcataacgtccagaatgtttaccagctccatgacttatgaatactaatgccttaggatatgtaataggtttccaatatttacaatatatgtaatcattgtccagattgaacatacagtttgcactcatgattcacgttatataactatcaatattaacagttcgtttgatgatcatattatttttatgttttattgataattgtaaaaacatacaattaaatcaatatagaggaaggagacggatactgtcttttgtgagatagtcatggcgactaaatcagattatgaggatgctgttttttactttgtggatgatgataaaatatgtagtcgcgactccatcatcgatctaatagatgaatatatcacgtggagaaatcatgttatagtgtttaacaaagatattaccagttgtggaagactgtacaaggaattgatgaagttcgatgatgccgctatacagtactatggtattgataaaattaatgagattgtcgaagctatgagcgaaggagaccactacatcaattttacaaaagtccatgatcaggaaagtttattcgctaccataggaatatgtgctaaaatcactgaacattggggatacaaaaagatttcagaatctagattccaatcattgggaaacattacagatctgatgaccgacgataatataaacatcttgatactttttctagaaaaaaaattgaattgatgatataggggtcttcataacgcataattattacgttagcattctatatccgtgttaaaaaaaattatcctatcatgtatttgagagttttatatgtagcaaacatgatagctgtgatgccaataagctttagatattcacgcgtgctagtgttagggatggtattatctggtggtgaaatgtccgttatataatctacaaaacaatcatcgcatatagtatgcgatagtagagtaaacatttttatcgtttctactgggttcatacatcgtctacccaattcggttatgaatgaaattgtcgccaatcttacacccaaacccttgttatccattagcatagtattaacttcgttatttatgtcataaactgtaaatgattctgtagatgccatatcatacatgatattcatgtccctattataatcattactaactttatcacaatatatgttgataatatctatatatgatctagtctttgtgggcaactgtctatacaagtcgtctaaacgttgtttactcatatagtatcgaacagccatcattacatggtcccgttccgttgatagataatcgagtatgttagtggacttgtcaaatctatataccatattttctggaagtggatatacatagtcgtgatcaacattattgctagcctcatcttctatatcctgtactataccattatctatatcatctacataatctacgatattattatacataaacatcgacaacatactattgtcaattatctaagtcctgttgatccaaacccttgatctcctctatctgtactatctagagattgtacttcttccagttctggataatatatacgttgatagattagctgggctattctatcccccgtatttacattaaacgtacattttccattattaataagaataactcctatgtttcccctataatcttcgtctattacaccgcctcctatatcaatgccttttagggacagaccagacctaggagctattctaccatagcagaacttaggcatggacatactaatatctgtcttaattaactgtcgttctccaggagggatagtataatcgtaagcgctatataaatcatatccggcggcgtaaggtgattgcctagtaggagatttagctctgttagtttccttaacaaatctaactggtgagttaatattcatgttgaacataaaactaatattttatttcaaaattatttaccatcccatatattccatgaataagtgtgatgattgtacacttctatagtatctatatacgattcacgataaaatcctcctatcaatagcagtttattatccactatgatcaattctggattatccctcggataaataggatcatctatcagagtccatgtattgctggattcacaataaaattccgcatttctaccaaccaagaataaccttctaccgaacactaacgcgcatgatttataatgaggataataagtggatggtccaaactgccactgatcatgattgggtagcaaatattctgtagttgtatcagtttcagaatgtcctcccattacgtatataacattgtttatagatgccactgctggattacatctaggtttcagaagactcggcatattaacccaagcagcatccccgtggaaccaacgctcaacagatgtgggatttggtagacctcctactacgtataatttattgttagcgggtatcccgctagcatacagtctggggctattcatcggaggaattggaatccaattgtttgatatataatttacagctatagcattgttatgtatttcattgttcatccatccaccgatgagatatactacttctccaacatgagtacttgtacacatatggaatatatctataatttgatccatgttcataggatactctatgaatggatacttgtatgatttgcgtggttgtttatcacaatgaaatattttggtacagtctagtatccattttacattatttatacctctgggagaaagataatttgacctgattacatttttgataaggagtagcagatttcctaatttatttcttcgctttatataccacttaatgacaaaatcaactacataatcctcatctggaacatttagttcatcgctttctagaataagtttcatagatagataatcaaaattgtctatgatgtcatcttccagttccaaaaagtgtttggcaataaagtttttagtatgacataagagattggatagtccgtattctatacccatcatgtaacactcgacacaatattcctttctaaaatctcgtaagataaagtttatacaagtgtagatgataaattctacagaggttaatatagaagcacgtaataaattgacgacgttatgactatctatatatacctttccagtatatgagtaaataactatagaagttaaactgtgaatgtcaaggtctagacaaacccttgtaactggatctttatttttcgtgtatttttgacgtaaatgtgtgcgaaagtaaggagataactttttcaatatcgtagaattgactattatattgccacctatagcatcaataattgttttgaatttcttagtcatagacaatgctaatatattcttacagtacacagtattaacaaatatcggcatttatgtttctttaaaagtcaacatctagagaaaaatgattatctttttgagacataactcccattttttggtattcacccacacgtttttcgaaaaaattagtttttccttccaatgatatattttccatgaaatcaaacggattggtaacattataaatttttttaaatcccaattcagaaatcaatctatccgcgacgaattctatatatgttttcatcatttcacaattcattcctataagtttaactggaagagccgcagtaagaaattcttgttcaatggatactgcatctgttataatagatctaacggtttcttcactcggtggatacaataaatgtttaaacatcaaacatgcgaagtcgcagtgtagaccctcgtctctactaattagttcgttggaaaacgtgagtccgggcattaggccacgctttttaagccaaaatatggaagcgaatgatccggaaaagaagattccttctactgcagcaaaggcaataagtctctctccataaccggcgctgtcatgtatccacttttgagcccaatcggccttcttttttacacaaggcattgtttctatggcattaaagagatagtttttttcattactatctttaacataagtatcgatcaaaagactatacatttccgaatgaatgttttcaatggccatctgaaatccgtagaaacatctagcctcggtaatctgtacttctgtacaaaatcgttccgccaaattttcattcactattccgtcactggctgcaaaaaacgccaatacatgttttataaaatatttttcgtctggtgttagtttattccaatcattgatatctttagatatatctacttcttccactgtccaaaatgatgcctctgcctttttatacatgttccagatgtcatgatattggattgggaaaataacaaatctatttggatttggtgcaaggatgggttccataactaaattaacaatatcaataaattttttttcagttatctatatgcctgtacttggattttttgtacatcgatatcgccgcaatcactacaataattacaagtattattgatagcattgttattagtactatcataattaaattatcgacattcatgggtgctgaataatcgttattatcatcattatcattttgtaattgtgacatcatactaaataaatcgtttgcgagattgttgtgggaagcgggcatggaggatgcattatcattattatttaacgccttccatttggattcacaaatatggcgcgcgttcaacattttatggaaactataattttgtgaaaacagataacaagaaaactcgtcatcgttcaaatttttaacgatagtaaaccgattaaacgtcgagctaatttctaacgctagcgactctgttggatatgggtttccagatatatatcttttcagttcccctacgtatctataatcatctgtaggaaatggaagatatttccatttatctactgttcctaatatcatatgtggtggtgtagtagaaccattaagcgcgaaagatgttatttcgcatcgtattttaacttcgcaataatttctggttagataacgcactctaccagtcaagtcaatgatattagcctttacagatatattcatagtagtcgtaacgatgactccatcttttagatgcgatactcctttgtatgtaccagaatcttcgtacctcaaactcgatatatttaaacaagttaatgagatattaacgcgttttatgaatgatgatatataaccagaagttttatcctcggtggctagcgctataaccttatcattataataccaactagtgtgattaatatgtgacacgtcagtgtgggtacaaatatgtacattatcgtctacgtcgtattcgatacatccgcatacagccaacaaatataaaatgacaaatactctaacgccgttcgtacccatcttgatgcggtttaataaatgttttgatttcaatttattgtaaaaaaagattcggttttatactgttcgatattctcattgcttatattctcatctatcatctccacacagtcaaatccgtggttagcatgcacctcatcaaccggtaaaagactatcggactcttctatcattataactctagaatatttaatttggtcattattaatcaagtcaattatcttatttttaacaaacgtgagtattttactcattttttataaaaacttttagaaatatacagactctatcgtgtgtctatatcttctttttatatccaatgtatttatgtctgatttttcttcatttatcatatataatggtccaaattctacacgtgcttcggattcatccagatcattaaggttcttataattgtaacatccttctcttccctcttctacatcttccttcttattcttattcttagcgtcacagaatctaccacagcaggatcccatgacgagcgtcatattaaactaatccattttcaattataatatatgattagtaatgaccattaaaataaaaaatattcttcataaccggcaagaaagtgaaaagttcacattgaaactatgtcagtagtatacatcatgaaatgatgatatatatatactctattttggtggaggattatatgatataattcgtggataatcattcttaagacacatttcttcattcgtaaatcttttcacgttaaatgagtgtccatattttgcaatttcttcatatgatggcggtgtacgtggacgaggctgctcctgttcttgttgtggtcgccgactgtcgtgtttgcgtttatccctccattatcgcgattgcgtagatggagtactattatataccttgtaattaaatttttttattaattaaacgtataaaaacgttccgtatctgtatttaagagccagatttcgtctaatagaacaaatagctacagtaaaaataactagaataattgctacacccactagaaaccacggatcgtaatacggcaatcggttttcgataataggtggaacgtatattttatttaaggacttaacaattgtctgtaaaccacaatttgcttccgcggatcctgtattaactatctgtaaaagcatatgttggccgggcggagccgaacattctccgatatccaatttctgtatatctataatattattaacctccgcatacgcattacagttcttttctagcttggataccgcactaggtacatcgtctagatctattcctatttcctcagcgatagctcttctatccttttccggaagcaatgaaatcacttcaataaatgattcaaccatgagtgtgaaactaagtcgagaattactcatgcatttgttagttattcggagcgcgcaatttttaaactgtcctataacctctcctatatgaatagcacaagtgacattagtagggatagaatgttgagctaatttttgtaaataactatctataaaaagattatacaaagttttaaactctttagtttccgccatttatccagtctgagaaaatgtctctcataataaatttttccaagaaactaattgggtgaagaatggaaacctttaatctatatttatcacagtctgttttggtacacatgatgaattcttctaatgccgtactaaattcgatatctttttcgatttctggatatgtttttaataaagtatgaacaaagaaatggaaatcgtaataccagttatgtttaactttgaaattgttttttattttcttgttaatgattccagccacttgggaaaagtcaaagtcgtttaatgccgatttaatacgttcattaaaaacaaactttttatcctttagatgaattattattggttcattggaatcaaaaagtaagatattatcgggtttaagatctgcgtgtaaaaagttgtcgcagcatggtagttcgtagattttaatgtataacagagccatctgtaaaaagataaactttatgtattgtaccaaagatttaaatcctaatttgatagctaactcggtatctactttatctgccgaatacagtgctaggggaaaaattataatgtttcctctttcgtattcgtagttagttctcttttcatgttcgaaaaagtgaaacatgcggttaaaatagtttataacattaatattactgttaataactgccgggtaaaagtgggatagtaatttcacgaatttgatactgtcctttctctcgttaaacgcctttagaaaaactttagaagaatatctcaatgatagttcctgaccatccatagtttgtatcaataatagcaacatatgaagaacacgtttatacagagtatgtaaaaatgttaatttatagtttaatcccatggcccacgcacacacgattaattttttttcatctccctttagattgttgtatagaaatttgggtactgtgaactccgccgtagtttccatgggactatataattttgtggcctcgaatacaaattttactacatagttatctatcttaaaaactataccatatcctcctgtagatatgtgataaaaatcgtcgtttataggataaaatcgtttatccttttgttggaaaaaggatgaattaatgtaatcattctcttctatctttagtagtgtttccttattaaaattcttaaaataatttaacaatctaactgacggagcccaattttggtgtaaatctaattgggacattatattgttaaaatacaaacagtctcctaatataacagtatctgataatctatggggagacatccattgatattcaggggatgaatcattggcaacacccatttattgtacaaaaagccccaatttacaaacgaaagtccaggtttgatagagacaaactattaactattttgtctctgtttttaacacctccacagtttttaatttctttagtaatgaaattattcacaatatcagtatcttctttatctaccagagattttactaacttgataaccttggctgtctcattcaatagggtagtaatatttgtatgtgtgatattgatatctttttgaattgtttcttttagaagtgattctttgatggtgccagcatacgaattacaataatgcagaaactcggttaacatgcaggaattatagtaagccaattccaattgttgcctgtgttgtattagagtgtcaatatgagcaatggtgtccttgcgtttctctgatagaatgcgagcagcgattttggcgttatcatttgacgatatttctggaatgacgaatcctgtttctactaactttttggtaggacaaagtgaaacaatcaagaagatagcttctcctcctatttgtggaagaaattgaactcctctagatgatctactgacgatagtatctccttgacagatattggaccgaattacagaagtacctggaatgtaaagccctgaaaccccctcattttttaagcagattgttgccgtaaatcctgcactgtgaccaagatagagagctcctttggtgaatccatctctatgtttcagtttaaccaagaaacagtcagctggtctaaaatttccatctctatctaatacagcatctaacttgatgtcaggaactatgaccggtttaatgttatatgtaacattgagtaaatccttaagttcataatcatcactgtcatcagttatgtacgatccaaacaatgtttctactggcatagtggatacgaagatgctatccatcagaatgtttccctgattagtattttctatatagctattcttctttaaacgattttccaaatcagtaactatgttcatttttttaggagtaggacgcctagccagtatggaagaggattttctagatcctctcttcaacatctttgatctcaatggaatgcaaaaccccatagtgaaacaaccaacgataaaaataatattgtttttcactttttataattttaccatctgactcatggattcattaatatctttataagagctactaacgtataattctttataactgaactgagatatatacaccggatctatggtttccataattgagtaaatgaatgctcggcaataactaatggcaaatgtataaaacaacgaaattatactagagttgttaaagttaatattttctatgagctgttccaataaattatttgttgtgactgcgttcaagtcataaatcatcttgatactatccagtaaacagtctttaagttctggaatattatcatcccattgtaaagcccctaattcgactatcgaatatcctgctctgatagcagtttcaatatcgacggacgtcaatactgtaataaaggtggtagtattgtcatcatcgtgataaactacgggaatatggtcgttagtaggtacggtgactttacacaacgcgatatataactttccttttgtaccatttttaacgtagttgggacgtcctgcagggtattgttttgaagaaatgatatcgagaacagatttgatacgatatttgttggattcctgattattcactataatataatctagacagatagatgattcgataaatagagaaggtatatcgttggtaggataatacatccccattccagtattctcggatactctattgatgacactagttaagaacatgtcttctattctagaaaacgaaaacatcctacatggactcattaaaacttctaacgctcctgattgtgtctcgaatgcctcgtacaaggatttcaaggatgccatagattctttgaccaacgatttagaattgcgtttagcatctgatttttttattaaatcgaatggtcggctctctggtttgctaccccaatgataacaatagtcttgtaaagataaaccgcaagaaaatttatacgcatccatccaaataaccctagcaccatcggatgatattaatgtattattatagattttccatccacaattattgggccagtatactgttagcaacggtatatcgaatagattactcatgtaacctactagaatgatagttcgtgtactagtcataatatctttaatccaatctaagaaatttaaaattagattttttacactgttaaagttaacaaaggtattacccggatacgtggatatcatatatggcattggtccattatcagtaatagctccataaactgatacggcgatggtttttatatgtgtttgatctaacgaggaagaaattcgcgcccacaattcatctctagatatgtatttaatatcaaacggtaacacatcaatttcgggacgcgtatatgtttctaaatttttaatccaaatataatgatgacctatatgccctattatcatactgtcaactatagtacacctagagaacttacgatacatctgtttcctataatcgttaaattttacaaatctataacatgctaaaccttttgacgacaaccattcattaatttctgatatggaatctgtattctcgataccgtattgttctaaagccagtgctatatctccctgttcgtgggaacgctttcgtataatatcgatcaacggataatctgaagtttttggagaataatatgactcatgatctatttcgtccataaacaatctagacataggaattggaggcgatgatcttaattttgtgcaatgagtcgtcaatcctataacttctaatattgtaatattcatcatcgacataacactatctatgttatcatcgtatattagtataccacggccttcttcatttcgtgccaaaataatatacagtcttaaataattacgcaatatctcaatagtttcataattgttagctgttttcatcaaggtttgtatcctgtttaacatgatggcgttctataacgtctctattttctatttttaattttttaaatttttaacgatttactgtggctagatacccaatctctctcaaatatttttttagcctcgcttacaagctgtttatctatactattaaaactgacgaatccgtgattttggtaatgggttccgtcgaaatttgccgaagtgatatgaacatattcgtcgtcgactatcaacaattttgtattattctgaatagtgaaaaccttcacagatagatcattttgaacacacaacgcgtctagacttctggcggttgccatagaatatacgtcgttcttatcccaattaccaactagaagtctgatcttaactcctctattaatggctgcttctataatggagttgtaaatgtcaggccaatagtagctattaccgtcgacacgtgtagtgggaactatggccaaatgttcaatatctatactagtcttagccgacttgagtttatcaataactacatcagtgtctagatctctagaatatcccaataggtgttctggagaatcagtaaagaacactccacctataggattcttaatatgatacgcagtgctaactggcagacaacaagccgcagagcataaattcaaccatgaattttttgcgctattaaaggctttaaaagtatcaaatcttctacgaagatctgtggccagcgggggataatcagaatatacacctaacgttttaatcgtatgtatagatcctccagtaaatgacgcgtttcctacataacatctttcatcatctgacacccaaaaacaaccgagtagtagtcccacattattttttttatctatattaacggttataaaatttatatccgggcagtgactttgtagctctcccagatttcttttccctcgttcatctagcaaaactattattttaatccctttttcagatgcctcttttagtttatcaaaaataagcgcgcccctagtcgtactcagaggattacaacaaaaagatgctatgtatatatatttcttagctagagtgataatttcgttaaaacattcaaatgttgttaaatgatcggatctaaaatccatattttctggtagtgtttctaccagcctacattttgctcccgcaggtaccggtgcaaatggccacatttagttaacataaaaacttatacatcctgttctatcaacgattctagaatatcatcggctatatcgctaaaattttcatcaaagtcgacatcacaacctaactcagtcaatatattaagaagttccatgatgtcatcttcgtttatttctatatccgtatccattgtagattgttgaccgattatcgagtttaaatcattactaatactcaatccttcagaatacaatctgtgtttcattgtaaatttataggcggtgtatttaagttggtagattttcaattatgtatcaaagaagtgtctgctttatggccttataagctccctcaagctcaacagctgctcccaagaaatcggcttcctttttatagaagttattgtacctggatcgagagttaatttccctgtcgttaaccatatccccgatagtcttgactatgcatttcaaggcaatgagatcgttttcttcgacgaattccttcgctttatttacaaattttttagaagcctcaacaaactttgaatctacaaacttactactgattacgtcaaatgactctatgtacgcaagagccacggacttgcggagcttctcgtaggaatcggcaacatgtcgagcattagacacatcgttatcgacggcctggtccagttctatagcaaagtcatcgatcagtttgctcaggaacattggtttgtactcttcgatgatcttttccaattctttgaacttattgactatcttgttatcctttttaagaatggatatggcttggtttactttagatttatcggagctggtgccctcgctgtatgtcattatataggtcattatatcgttgtacgccccggtatattcactgtagatagcgtccaatttaatagagtaatatttggctttttccacgaaaattttaagttcatcaatatttctttgattaagtctagacacatcgcaagaaccacctccccctgatcctccgccaccggaccctcctccaccatatagcaacagtagttcttgctcctccttgattctagcatcctcttcattattttcttctacgtacataagcatgtccaatacgttagacaacacaccgacgatggcggccgccacagacacgaatatgactagaccgatgaccatttaaaaacccctctctagctttcacttaaactgtatcgattattcttttagaacatgtataatataaaaacattattctatttcgaatttaggcttccaaaaatttttcatccgtaaaccgataataatatatatagacttgttaatagtcggaataaatagattaatgcttaaactatcatcatctccacgattagagatacaatatttacattctttttgctgtttcgaaactttatcaatacacgttaatacaaacccaggaaggagatattgaaactgaggctgttgaaaatgaaacggtgaatacaataattcagataatgtaaaatcatgattccgtattctgatgatattagaactgctaatggatgtcgatggtatgtatctaggagtatctattttaacaaagcatcgatttgctaatatacaattatcattttgattaattgttattttattcatattcttaaaaggtttcatatttatcaattcttctacattaaaaatttccatttttaatttatgtagccccgcaatactcctcattacgtttcattttttgtctataatatccattttgttcatctcggtacatagattatccaattgagaagcgcatttagtagttttgtacattttaagtttattgacgaatcgtcgaaaactagttatagttaacattttattatttgataccctgatattaatacccctgccgttactattatttataactgatgtaacccacgtaacattagaattaattatcgatagtaatgcatcgacgcttccaaaattgtctattataaactcaccgataatttttttattgcatgttttcatattcattaggattatcaaatctttaatcttattacgattgtatgcgttgatattacaagacgtcattctaaaagacggaggatctccatcaaatgccagacaatcacgtacaaagtacatggaaataggttttgttctattgcgcatcatagattcatatagaacacccatagaaatactaatttgttttactctataaaatactaatgcatctatttcatcgttttgtataacgtctttccaagtgccaaattccaaatttttttcattgatagtaccaaattcttctatctctttaactacttgcatagataggtaattacagtgatgcctacatgccgttttttgaaactgaatagatgcgtctagaagcgatgctacactagtcacaatcaccactttcatatttagaatatatgtatgtaaaaatatagtagaatttcattttgtttttttctatgctataaatgaattctcattttgcatctgctcatactccgttttatatcaataccaaagaaggaagatatctggttctaaaagccgttaaagtatgcgatgttagaactgtagaatgcgaaggaagtaaagcttcctgcgtactcaaagtagataaaccctcatcgcccgcgtgtgagagaagaccttcgtccccgtccagatgcgagagaatgaataaccctggaaaacaagtcccgtttatgaggacggacatgctacaaaatatgttcgcggctaatcgcgataatgtagcttctagacttttgtcctaaaatactattatatccttttcgatattaataaatccgtgtcgtccaggttttttatctctttcagtatgtgaatagataggtattttatctctattcatcatcgaatttaagagatccgataaacattgtttgtattctccagatgtcagcatctgatacaacaatatatgtgcacataaacctctggcacttatttcatgtaccttccccttatcactaaggagaatagtatttgagaaatatgtatacatgatattatcatgaattagatatacagaatttgtaacactctcgaaatcacacgatgtgtcggcgttaagatctaatatatcactcgataacacattttcatctagatacactagacattttttaaagctaaaatagtctttagtagtgacagtaactatgcgattattttcatcgatgatacatttcatcggcatattattacgcttaccatcaaagactataccatgtgtatatctaacgtattctagcatggttgccatacgtgcattaaacttttcaggatctttggatagatcttccaatctatctatttgagaaaacatttttatcatgttcaatagttgaaacgtcggatccactatatagatattatctataaagattttaggaactacgttcatggtatcctggcgaatattaaaactatcaatgatatgattatcgttttcatcttttatcaccatatagtttctaagatatgggattttacttaatataatattatttcccgtgataaattttattagaaaggccaaatctataagaaaagtcctagaattagtctgaagaatatctatatcgccgtaccgtatatttggattaattagatatagagaatatgatccgtaacatatacaacttttattatggcgtctaagatattcttccatcaacttattaacatttttgactagggaagatacattatgacgtcccattacttttgccttgtctattactgcgacgttcatagaatttagcatatctcttgccaattcttccattgatgttacattataagaaattttagatgaaattacatttggagctttaatagtaagaactcctaatatgtccgtgtatgtggtcactaatacagattgtagttctataatcgtaaataatttacctatattatatgtttgagtctgtttagaaaagtagctaagtatacgatcttttatttctgatgcagatgtatcaacatcggaaaaaaatctttttttattcttttttactaaagatacaaatatgtctttgttaaaaacagttattttctgaatatttctagcttgtaattttaacatatgatattcgttcacactaggtactctgcctaaataggtttctataatctttaatgtaatattaggaagagtattctgatcaggattcctattcattttgaggatttaaaactctgattattgtctaatatggtctcaacacaaactttttcacagagcgatagagtttttgataactcgtttttcttaagaaatataaaactactgtttccagagctcgctctatcttttattttatctaattcgatacaaactcctgatactggttcagaaagtaattcattaattttcagtcctttatagaagatatttaatatagataatacaaaattttcagttcttgatatcgatctgattgatcctagaactagatatattaataacgtgctcattaggcagtttatggcagcttgataattagatatagtatattccagttcatatttattagataccgcattgcccagattttgatattctatgaattcctctgaaaataaatccaaaataactagacattctattttttgtggattagtgtactctcttccctctatcatgttcactactggtgtccacgatgataaatatctagagggaatataatatagtccataggatgccaatctagcaatgtcgaataactgtaatttgattcttcgttcttcattatgaattgattcttgaggtataaacctaacacaaattatattattagacttttcgtatgtaatgtctttcatgttataagtttttaatcctggaatagaatctattttaatgaggcttttaaacgcagagttctccaacgagtcaaagcataatactctgttgtttttcttatatacgatgttacgattttcttctttgaatggaataggtttttgaattagtttataattacaacataatagataaggaagtgtgcaaatagtacgcggaaaaaacataatagctcccctgttttcatccatggttttaagtaaatgatcactggcttctttagtcaatggatattcgaacattaaccgtttcatcatcattggacagaatccatatttcttaatgtaaagagtgatcaaatcattgtgtttattgtaccatcttgttgtaaatgtgtattcggttatcggatctgctcctttttctattaaagtatcgatgtcgatctcgtctaagaattcaactatatcgacatatttcatttgtatacacataaccattactaacgtagaatgtataggaagagatgtaacgggaacagggtttgttgattcgcaaactattctaatacataattcttctgttaatacgtcttgcacgtaatctattatagatgccaagatatctatataattattttgtaagatgatgttaactatgtgatctatataagtagtgtaataattcatgtatttcgatatatgttccaactctgtctttgtgatgtctagtttcgtaatatctatagcatcctcaaaaaatatattcgcatatattcccaagtcttcagttctatcttctaaaaaatcttcaacgtatggaatataataatctattttacctcttctgatatcattaatgatatagtttttgacactatcttctgtcaattgattcttattcactatatctaagaaacggatagcgtccctaggacgaactactgccattaatatctctattatagcttctggacataattcatctattataccagaattaatgggaactattccgtatctatctaacatagttttaagaaagtcagaatctaagacctgatgttcatatattggttcatacatgaaatgatctctattgatgatagtgactatttcattctctgaaaattggtaactcattctatatatgctttccttgttgatgaaggatagaatatactcaatagaatttgtaccaacaaactgttctcttatgaatcgtatatcatcatctgaaataatcatgtaaggcatacatttaacaattagagacttgtctcctgttatcaatatactattcttgtgataatttatgtgtgaggcaaatttgtccacgttctttaattttgttatagtagatatcaaatccaatggagctacagttcttggcttaaacagatatagtttttctggaacgaattctacaacattattataaaggactttgggtagataagtgggatgaaatcctattttaattaatgcgatagccttgtcctcgtgcagatatccaaacgcttttgtgatagtatggcattcattgtctagaaacgctctacgaatatctgtgacagatatcatctttagagaatatactagtcgcgttaatagtactacaatttgtattttttaatctatctcaataaaaaaattaatatgtatgattcaatgtataactaaactactaactgttattgataactagaatcagaatctaatgatgacgtaaccaagaagtttatctactgccaatttagctgcattatttttagcatctcgtttagattttccatctgccttatcgaatactcttccgtcgatgtctacacaggcataaaatgtaggagagttactaggccccactgattcaatacgaaaagaccaatctctcctagtaatttggcagtactcattaataacggtgacagggttagcacctttccaatcaataatttttttagccggaataacatcatcaaaagacttatgatcctctctcattgatttttcgcgggatacatcatctattatggcgtcagccataacatcagcatccggcttatccgcctccgttgtcataaaccaacgaggaggaatatcgtcggagctgtacaccatagcactacgttgaagatcgtacagagctttattaacttctcgcttctccatattaagttgtctagttagttgtgcagcagtagctccttcgattccaatggttttaatagcctcacacacaatctctgcgttagaacgttcgtcgatatagattttagacatttttagagagaactaacacaaccagcaataaaactgaacctactttatcatttttttattcatcatcctctggtggttcgtcgttcctatcgaatgtggatctgattaacccgtcatctataggtgatgctggttctggagattctggaggagatggattattatctggaagaatctctgttatttccttgttttcatgtatcgattgcgttgtaacattaagattgcgaaatgctctaaatttgggaggcttaaagtgttgtttgcaatctctacacgcatgtctaactagtggaggttcgtcagcggctctagtttgaatcatcatcggcgtagtattcctacttttacagttaggacacggtgtattgtatttctcgtcgagaacgttaaaataatcgttgtaactcacatcctttattttatctatattgtattctactcctttcttaatgcattttataccgaataagagatagcgaaggaattctttttcggtgccgctagtacccttaatcatatcacatagtgttttatattccaaatttgtggcaatagacggtttatttctatacgatagtttgtttctggaatcctttgagtattctataccaatattattctttgattcgaatttagtttcttcgatattagattttgtattacctatattcttgatgtagtactttgatgatttttccatggcccattctattaagtcttccaagttggcatcatccacatattgtgatagtaattctcggatatcagtagcggctaccgccattgatgtttgttcattggatgagtaactactaatgtatacattttccatttataacacttatgtattaactttgttcatttatattttttcattattatgttgatattaacaaaagtgaatatatatgttaataattgtattgtggttatacggctacaatttcataatgagtggaagtcagtgtccgatgatcaatgacgatagctttactctgaaaagaaagtatcaaatcgatagtgcggagtcaacaataaaaatggataagaagaggataaagtttcagaatagagccaaaatggtaaaagaaataaatcagacaataagagcagcacaaactcattacgagacattgaaactaggatacataaaatttaagagaatgattaggactactactctagaagatatagcaccatctattccaaataatcagaaaacttataaactattctcggacatttcagccatcggcaaagcatcacagaatccgagtaagatggtatatgctctgctgctttacatgtttcccaatttgtttggagatgaccatagattcattcgttatagaatgcatccaatgagtaaaatcaaacacaagatcttctctcctttcaaacttaatcttattagaatattagtggaagaaagattctataataatgaatgcagatctaataaatggagaataattggaacacaagttgataaaatgttgatagctgaatctgataaatatacaatagatgcaaggtataacctaaaacccatgtatagaatcaagggaaaatctgaagaagataccctcttcatcaaacagatggtagaacaatgtgtgacatcccaggaattggtggaaaaagtgttgaagatactgtttagagatttgttcaagagtggagaatacaaagcatacagatacgatgatgatgtagaaaatggatttattggattggatacactaaaattaaacattgttcatgatatagttgaaccatgtatgcctgttcgtaggccagtggctaagatactgtgtaaagaaatggtaaataaatactttgagaatccgctacatattattggtaaaaatcttcaagagtgcattgactttgttagtgaataggcatttcatctttctccaatactaattcaaattgttaaattaataatggatagtataaatagttattagtgataaaatagtaaaaataattattagaataagagtgtagtatcatagataactctcttctataaaaatggattttattcgtagaaagtatcttatatacacagtagaaaataatatagattttttaaaggatgatacattaagtaaagtaaacaattttaccctcaatcatgtactagctctcaagtatctagttagcaattttcctcaacacgttattactaaggatgtattagctaataccaatttttttgttttcatacatatggtacgatgttgtaaagtgtacgaagcggttttacgacacgcatttgatgcacccacgttgtacgttaaagcattgactaagaattatttatcgtttagtaacgcaatacaatcgtacaaggaaaccgtgcataaactaacacaagatgaaaaatttttagaggttgccgaatacatggacgaattaggagaacttataggcgtaaattatgacttagttcttaatccattatttcacggaggggaacccatcaaagatatggaaatcatttttttaaaactgtttaagaaaacagacttcaaagttgttaaaaaattaagtgttataagattacttatttgggcatacctaagcaagaaagatacaggcatagagtttgcggataatgatagacaagatatatatactctatttcaacaaactggtagaatcgtccatagcaatctaacagaaacgtttagagattatatctttcccggagataagactagctattgggtgtggttaaacgaaagtatagctaatgatgcggatatcgttcttaatagacacgccattaccatgtatgataaaattcttagttatatatactctgagataaaacaaggacgcgttaataaaaacatgcttaagttagtttatatctttgagcctgaaaaagatatcagagaacttctgctagaaatcatatatgatattcctggagatatcctatctattattgatgcaaaaaacgacgattggaaaaaatattttattagtttttataaagctaattttattaacggtaatacatttattagtgatagaacgtttaacgaggacttattcagagttgttgttcaaatagatcccgaatatttcgataatgaacgaattatgtctttattctctacgagtgctgcggacattaaacgatttgatgagttagatattaataacagttatatatctaatataatttatgaggtgaacgatatcacattagatacaatggatgatatgaagaagtgtcaaatctttaacgaggatacgtcgtattatgttaaggaatacaatacatacctgtttttgcacgagtcggatcccatggtcatagagaacggaatactaaagaaactgtcatctataaaatccaagagtagacggctgaacttgtttagcaaaaacattttaaaatattatttagacggacaattggctcgtctaggtcttgtgttagatgattataaaggagacttgttagttaaaatgataaaccatcttaagtctgtggaggatgtatccgcattcgttcgattttctacagataaaaaccctagtattcttccatcgctaatcaaaactattttagctagttataatatttccatcatcgtcttatttcaaaggtttttgagagataatctatatcatgtagaagaattcttggataaaagcatccatctaaccaagacggataagaaatatatacttcaattgataagacacggtagatcatagaacagaccaaatatattattaataatttgtatatacatagatataattatcacatattaaaaattcacacatttttgataaatgggaactgctgcaacaattcagactcccaccaaattaatgaataaagaaaatgcagaaatgattttggaaaaaattgttgatcatatagttatgtatattagtgacgaatcaagtgattcagaaaataatcctgaatatattgattttcgtaacagatacgaagactatagatctctcattataaaaagtgatcacgagtttgtaaagctatgtaaaaatcatgcagagaaaagttctccagaaacgcaacaaatgattatcaaacacatatacgaacaatatcttattccagtatctgaagtactattaaaacctataatgtccatgggtgacataattacatataacggatgtaaagacaatgaatggatgctagaacaactctctaccctaaactttaacaatctccgcacatggaactcatgtagcataggcaatgtaacgcgtctgttttatacattttttagttatctgatgaaagataaactaaatatataagtataatcccattctaatactttaacctgatgtattacctgcatcttattagaatattaacctaactaaaagacataacataaaaactcattacatagttgataaaaagcggtaggatataaatattatggctgccaccgttccgcgttttgacgacgtgtacaaaaatgcacaaagaagaattctagatcaagaaacattttttagtagaggtctaagtagaccgttaatgaaaaacacatatctatttgataattacgcgtatggatggataccagaaactgcaatttggagtagtagatacgcaaacttagatgcaagtgactattatcccatttcgttgggattacttaaaaagttcgagtttctcatgtctctatataaaggtcctattccagtatacgaagaaaaagtaaatactgaattcatagccaatggatcgttctctggtagatacgtatcatatcttcgaaagttttctgctcttccaacaaacgagtttattagttttttgttactgacttccattccaatctataatatcttgttctggtttaaaaatactcagtttgatattactaaacacacattattcagatacgtctatacagataatgccaaacacctggcgttggctaggtatatgcatcaaacaggagactataagcctttgtttagtcgtctcaaagagaattatatatttaccggtcccgttccaataggtatcaaagatatagatcaccctaatcttagtagagcaagaagtccatccgattatgagacattagctaatattagtactatattgtactttaccaagtatgatccggtattaatgtttttattgttttacgtacctgggtattcaattactacaaaaattactccagccgtagaatatctaatggataaactgaatctaacaaagagcgacgtacaactgttgtaaattattttatgcttcgtaaaatgtaggttttgaaccaaacattctttcaaagaatgagatgcataaaactttattatccaatagattgactatttcggacgtcaatcgtttaaagtaaacttcgtaaaatattctttgatcactgccgagtttaaaacttctatcgataattgtctcatatgttttaatatttacaagttttttggtccatggtacattagccggacaaatatatgcaaaataatatcgttctccaagttctatagtttctggattatttttattatattcagtaaccaaatacatattagggttatctgcggatttataatttgagtgatgcattcgactcaacataaataattctagaggagacgatctactatcaaattcggatcgtaaatctgtttctaaagaacggagaatatctatacatacctgattagaattcatccgtccttcagacaacatctcagacagtctggttttgtacatcttaatcatattcttatgaaacttggaaacatctcttctagtttcactagtacctttattaattctctcaggtacagattttgaattcgacgatgccgagtatttcatcgttgtatatttcttcttcgattgcataatcagattcttatataccgcctcaaactctattttaaaattattaaacaatactctactattaatcagtcgttctaactctttcgctatttctatagacttatctacatcttgactgtctatctctgtaaacacggagtcggtatctccatacacgctacgaaaacgaaatctgtaatctataggcaacgatgttttcacaatcggattaatatctctatcgtccatataaaatggattacttaatggattggcaaaccgtaacataccgttagataactctgctccatttagtaccgattctagatacaagatcattctacgtcctatggatgtgcaactcttagccgaagcgtatgagtatagagcactatttctaaatcccatcagaccatatactgagttggctactatcttgtacgtatattgcatggaatcataaatggccttttcagttgaactggtagcctgttttaacatctttttatatctggctctctctgccaaaaatgttcttaatagtctaggaatggttccttctatcgatctatcgaaaattgctatttcagagatgaggttcggtagtctaggttcacaatgaaccgtaatatatctaggaggtggatatttctgaagcaatagctgattatttatttcttcttccaatctattggtactaacaacgacaccgactaatgtttccggagatagatttccaaagatacacacattaggatacagactgttataatcaaagattaatacattattactaaacattttttgttttggagcaaataccttaccgccttcataaggaaacttttgttttgtttctgatctaactaagatagttttagtttccaacaatagctttaacagtggacccttgatgactgtactcgctctatattcgaataccatggattgaggaagcacatatgttgacgcacccgcgtctgtttttgtttctactccataatactcccacaaatactgacacaaacaagcatcatgaatacagtatctagccatatctaaagctatgtttagattataatccttatacatctgagctaaatcaacgtcatcctttccgaaagataatttatatgtatcattaggtaaagtaggacataatagtacgactttaaatccattttcccaaatatctttacgaattactttacatataatatcctcatcaacagtcacataattacctgtggttaaaacctttgcaaatgcagcggctttgcctttcgcgtccgtagtatcgtcaccgatgaacgtcatttctctaactcctctatttaatactttacccatgcaactgaacgcgttcttggatatagaatccaatttgtacgaatccaatttttcagatttttgaatgaatgaatatagatcgaaaaatatagttccattattgttattaacgtgaaacgtagtattggccatgccgcctactcccttatgactagactgatttctctcataaatacagagatgtacagcttcctttttgtccggagatctaaagataatcttctctcctgttaataactctagacgattagtaatatatctcagatcaaagttatgtccgttaaaggtaacgacgtagtcgaacgttagttccaacaattgtttagctattcgtaacaaaactatttcagaacatagaactagttctcgttcgtaatccatttccattagtgactgtatcctcaaacatcctctatcgacggcttcttgtatttcctgttccgttaacatctcttcattaatgagcgtaaacaataatcgtttaccacttaaatcgatataacagtaacttgtatgcgagattgggttaataaatacagaaggaaacttcttatcgaagtgacactctatatctagaaataagtacgatcttgggatatcgaatctaggtatttttttagcgaaacagttacgtggatcgtcacaatgataacatccattgttaatctttgtcaaatattgctcgtccaacgagtaacatccgtctggagatatcccgttagaaatataaaaccaactaatattgagaaattcatccatggtggcattttgtatgctgcgtttctttggctcttctatcaaccacatatctgcgacggagcattttctatctttaatatctagattataacttattgtctcgtcaatgtctatagttctcatctttcccaacggcctcgcattaaatggaggaggagacaatgactgatatatttcgtccgtcactacgtaataaaagtaatgaggaaatcgtataaatacggtctcaccatttcgacatctggatttcagatataaaaatctgttttcaccgtgactttcaaaccaattaatgcaccgaacatccatttatagaatttagaaatatattttcatttaaatgaatcccaaacattggggaagagccgtatggaccattatttttatagtactttcgcaagcgggtttagacggcaacatagaagcgtgtaaacgaaaactatatactatagtcagcactcttccatgtcctgcatgtagacggcacgcgactatcgctatagaggacaataatgtcatgtctagcgatgatctgaattatatttattattttttcatcagattatttaacaatttggcatctgatcccaaatacgcgatcgatgtgacaaaggttaaccctttataaacttaacccattataaaacttatgattagtcacaactgaaataaccgcgtgattattttttggtataattctacacggcatggtttctgtaactatgaattcaacccccgttacattagtgaaatctttaacaaacagcaagggttcgtcaaagacataaaactcattgtttacaatcgaaatagaccccctatcacacttaaaataaaaaatatccttatcctttaccaccaaataaaattctgattggtcaatgtgaatgtattcacttaacagttccacaaatttatttattaactccgaggcacatacatcgtcggtattttttatggcaaactttactcttccagcatccgtttctaaaaaaatattaacgagttccatttatatcatccaatattattgaaatgacgttgatggacagatgatacaaataagaaggtacggtacctttgtccaccatctcctccaattcatgctctattttgtcattaactttaatgtatgaaaacagtacgccacatgcttccatgacagtgtgtaacactttggatacaaaatgtttgacattagtataattgttcaagactgtcaatctataatagatagtagctataatatattctatgatggtattgaagaagatgacaaccttggcatattgatcatttaacacagacatggtatcaacagatagcttgaatgaaagagaatcagtaattggaataagcgtcttctcgatagagtgtccgtataccaacatgtctgatattttgatgtattccattaaattatttagttttttctttttattttcgttaaacagcatttctgtcaacggaccccaacatcgttgaccgattaagttttgattgatttttccgtgtaatgcgtatctagtcagatcgtatagcctatccaataatccatcatctgtgcgtagatcacatcgtacactttttaattctctatagaagagcgacagacatctggagcaattacagacagcaatttctttattctctacagatgtaagatacttgaagacattcctatgatgatgcagaattttggataacacggtattgatggtatctgttaccataattcctttgatggctgatagtgtcagagcacaagatttccaatctttgacaatttttagcaccattatctttgttttgatatctatatcagacagcatggtgcgtctgacaacacagggattaagacggaaagatgaaatgattctctcaacatcttcaatggataccttgctattttttctggcattatctatatgtgcgagaatatcctctagagaatcagtatcctttttgatgatagtggatctcaatgacatgggacgtctaaaccttcttattttatcaccagattgcatggtgatttgtcttctttcttttatcataatgtaatctctaaattcatcggcaaattgtctatatctaaaatcataatatgagatgtttacctctacaaatatctgttcgtccaatgttagagtatctacatcagttttgtattccaaattaaacatggcaacggatttaattttatattcctctattaagtcctcgtcgataataacagaatgtagataatcatttaatccatcgtacatggttggaagatgcttgttgacaaaatctttaattgtcttgatgaaggtgggactatatctaacatcttgattaataaaatttataacattgtccataggatactttgtaactagttttatacacatctcttcatcggtaagtttagacagaatatcgtgaacaggtggtatattatattcatcagatatacgaagaacaatgtccaaatctatattgtttaatatattatatagatgtagcgtagctcctacaggaatatctttaactaagtcaatgatttcatcaaccgttagatctattttaaagttaatcatataggcattgatttttaaaaggtatgtagccttgactacattctcattaattaaccattccaagtcactgtgtgtaagaagattatattctatcataagcttgactacatttggtcccgataccattaaagaattcttatgatataaggaaacagcttttaggtactcatctactctacaagaattttggagagccttaacgatatcagtgacgtttattatttcaggaggaaaaaacctaacattgagaatgtcggagttaatagcttccagatacagtgattttggcaatagtccgtgtaatccataatccagtaacacgagctggtgcttgctagacaccttttcaatgtttaatttttttgaaataagctttgataaagccttcctcgcaaattccggatacatgaacatgtcggcgacatgattaagtattgttttttcattatttttatattttctcaacaagttctcaataccccaatagatgatagaatatcacccaatgcgtccatgttgtctatttccaacaggtcgctatatccaccaatagaagtttttccaaaaaagattctaggaacagttctaccaccagtaatttgttcaaaatagtcacgcaattcattttcgggtttaaattctttaatatcgacaatttcatacgctcctcttttgaaactaaacttatttagaatatccagtgcatttctacaaaaaggacatgtatacttgacaaaaattgtcactttgttattggccaacctttgttgtacaaattcctcggccattttaatatttaagtgatataaaactatctcgacttatttaactctttagtcgagatatatggacgcagatagctatatgatagccaactacagaaggcaaacgctataaaaaacataattacgacgagcatatttataaatatttttattcagcattacttgatatagtaatattaggcacagtcaaacattcaaccactctcgatacattaactctctcattttctttaacaaattctgcaatatcttcgtaaaaagattcttgaaactttttagaatatctatcgactctagatgaaatagcgttcgtcaacatactatgttttgtatacataaaggcgcccattttaacagtttctagtgacaaaatgctagcgatcctaggatcctttagaatcacatagattgacgattcgtctctcttagtaactctagtaaaataatcatacaatctagtacgcgaaataatattatccttgacttgaggagatctaaacaatctagttttgagaacatcgataagttcatcgggaatgacatacatactatctttaatagaactcttttcatccagttgaatggattcgtccttaaccaactgattaatgagatcttctattttatcattttccagatgatatgtatgtccattaaagttaaattgtgtagcgcttctttttagtctagcagccaatactttaacatcactaatatcgatatacaaaggagatgatttatctatggtattaagaattcgtttttcgacatctgtcaaaaccaattcctttttgcctgtatcatccagttttccatcctttgtaaagaaattattttctactagactattaataagactgataaggattcctccataattgcacaatccaaactttttaacaaaactagactttacaagatctacaggaatgcgtacttcaggtttcttagcttgtgattttttcttttgtggacattttcttgtgaccaactcatctaccatttcattgattttagcagtgaaataagctttcaatgcacgggcactgatactattgaaaacgagttgatcttcaaattccgccatttaagttcaccaaacaacttttaaatacaaatatatcaatagtagtagaataagaactataaaaaaaataataattaaccaataccaaccccaacaaccggtattattagttgatgtgactgttttctcatcacttagaacagatttaacaatttctataaagtctgtcaaatcatcttccggagaccccataaatacaccaaatatagcggcgtacaacttatccatttatacattgaatattggcttttctttatcgctatcttcatcatattcatcatcaatatcaacaagtcccagattacgagccagatcttcttctacattttcagtcattgatacacgttcactatctccagagagtccgataacgttagccaccacttctctatcaatgattagtttcttgagtgcgaatgtaatttttgtttccgttccggatctatagaaaactacaggtgtgataattgccttggccaattgtctttctcttttactgagtgattctagttcaccttctatagatctgagaatggatgattctccagtcgaaacatattctaccatggatccgtttaatttgttgatgaagatggattcatccttaaatgttttctctgtaatagtttccaccgaaagactatgcaaagaatttggaatgcgttccttgtgcttaatgtttccatagacggcttctagaagttgatacaacataggactagccgcggtaacttttatttttagaaagtatccatcgcttctatcttgtttagatttatttttataaagtttagtctctccttccaacataataaaagtggaagtcatttgactagataaactatcagtaagttttatagagatagacgaacaattagcgtattgagaagcatttagtgtaacgtattcgatacattttgcattagatttactaatcgattttgcatactctataacacccgcacaagtctgtagagaatcgctagatgcagtaggtcttggtgaagtttcaactctcttcttgattaccttactcatgattaaacctaaataattgtactttgtaatataatgatatatattttcactttatctcatttgagaataaaaatgtttttgtttaaccactgcatgatgtacagatttcggaatcgcaaaccaccagtggttttattttatccttgtccaatgtgaattgaatgggagcggatgcgggtttcgtacgtagatagtacattcccgtttttagaccgagactccatccgtaaaaatgcatactcgttagtttggaataactcggatctgctatatggatattcatagattgactttgatcgatgaaggctcccctgtctgcagccatttttatgatcgtcttttgtggaatttcccaaatagttttataaactcgcttaatatcttctggaaggtttgtattctgaatggatccaccatctgccataatcctattcttgatctcatcattccataattttctctcggttaaaactctaaggagatgcggattaactacttgaaattctccagacaatactctccgagtgtaaatattactggtatacggttccaccgactcattatttcccaaaatttgagcagttgatgcagtcggcataggtgccaccaataaactatttctaagaccgtatgttctgattttatcttttagaggttcccaattccaaagatccgacggtacaacattccaaagatcatattgtagaataccgttactggcgtacgatcctacatatgtatcgtatggtccttccttctcagctagttcacaactcgcctctaatgcaccgtaataaatggtttcgaagatcttcttatttagatcttgtgcttccaggctatcaaatggataatttaagagaataaacgcgtccgctaatccttgaacaccaataccgataggtctatgtctcttattagagatttcagcttctggaataggataataattaatatctataattttattgagatttctgacaattactttgaccacatccttcagtttgagaaaatcaaatcgcccatctattacaaacatgttcaaggcaacagatgccagattacaaacggctacctcattagcatccgcatattgtattatctcagtgcaaagattactacacttgatagttcctaaattttgttgattactctttttgttacacgcatccttataaagaatgaatggagtaccagtttcaatctgagattctataatcgctttccagacgactcgagcctttattatagatttgtatctcctttctctttcgtatagtgtatacaatcgttcgaactcgtctccccaaacattgtccaatccaggacattcatccggacacatcaacgaccactctccgtcatccttcactcgtttcataaagagatcaggaatccaaagagctataaatagatctctggttctatgttcctcgtttcctgtattctttttaagatcgaggaacgccataatatcagaatgccacggttccaagtatatggccataactccaggccgtttgtttcctccctgatctatgtatctagcggtgttattataaactctcaacattggaataataccgtttgatataccattggtaccggagatatagcttccactggcacgaatattactaattgatagacctattccccctgccattttagagattaatgcgcatcgttttaacgtgtcatagataccctctatgctatcatcgatcatgttaagtagaaaacagctagacatttggtgacgactagttcccgcattaaataaggtaggagaagcgtgcgtaaaccatttttcagaaagtagattgtacgtctcaatagctgagtctatatcccattgatgaattcctactgcgacacgcattaacatgtgctgaggtctttcaacgatcttgttgtttattttcaacaagtaggatttttccaaagttttaaaaccaaaatagttgtatgaaaagtctcgttcgtaaataataaccgagttgagtttatccttatatttgttaactatatccatggtgatacttgaaataatcggagaatgtttcccatttttaggattaacatagttgaataaatcctccatcacttcactaaatagtttttttgtttccttgtgtagatttgatacggctattctggcggctagaatggcataatccggatgttgtgtagtacaagtggctgctatttcggctgccagagtgtccaattctaccgttgttactccattatatattccttgaataaccttcatagctattttaataggatctatatgatccgtgtttaagccataacataattttctaatacgagacgtgattttatcaaacatgacattttccttgtatccatttcgtttaatgacaaacatttttgttggtgtaataaaaaaattatttaacttttcattaatagggatttgacgtatgtagcgtacaaaattatcgttcctggtatatagataaagagtcctatatatttgaaaatcgttacggctcgattaaactttaatgattgcatagtgaatatatcattaggatttaactccttgactatcagggcggcaccagaaattaccatcaaaagcattaatacagttatgccgatcgcagttagaacggttatagcatccaccatttatatctaaaaattagatcaaagaatatgtgacaaagtcctagttgtatactgagaattgacgaaacaatgtttcttacatatttttttcttattagtaactgacttaatagtaggaactggaaagctagacttgattattctataagtatagatacccttccaaataatattctctttgataaaagttccagaaaatgtagaattttttaaaaagttatcttttgctattaccaagattgtgtttagacgcttattattaatatgagtgatgaaatccacaccgcctctagatatcgcttttatttccacattagatggtaaatccaatagtgaaactatctttttaggaatgtatggactcgcgtttagaggagtgaacgtcttaggcgtcggaaaggatgattcatcaaacgaataaacaatttcacaaatggatgttaatgtattagtaggaaattttttgacgctagtggaattgaagattctaatggatgatgttctacctatttcatccgataacatgttaatttccgacaccaacggttttaatatttcgatgatatacggtagtctctctttcggacttatatagcttattccacaatacgagtcattatatactccaaaaaacaaaataactagtataaaatctgtatcgaatgggaaaaacgaaattatcgacataggtatagaatctggaacattgaacgtattaatacttaattctttttctgtggtaagtaccgataggttattgacattgtatggttttaaatattctataacttgagacttgatagatattagtgatgaattgaaaattatttttatcaccacgtgtgtttcaggatcatcgtcgacgcccgtcaaccaaccgaatggagtaaaataaatatcattaatatatgctctagatattagtatttttatcaatcctttgattatcatcttctcgtaggcgaatgattccatgatcaagagtgatttaagaacatcctccggagtattaatgggcttagtaaacagtccatcgttgcaataataaaagttatccaagttaaaggatattatgcattcgtttaaagatatcacctcatctgacggagacaattttttggtaggttttagagactttgaagctacttgtttaacaaagttattcatcgtcgtttactattctatttaattttgtagttaatttatcacatatcacattaattgactttttggtccatttttccatacgtttatattcttttaatcctgcgttatccgtttccgttatatccagggatagatcttgcaagttaaatagaatgctcttaaataatgtcatttttttatccgctaaaaatttaaagaatgtataaacttttttcaaagatttaaaacttttaggtggagttctagtacacaatatcataaacaaactaataaacatcccgcattcagattccaacagctgattaacttccacattaatacagcctattttcgctccaaatgtacattcgaaaaatctgaataaaacatcgatgtcacaatttgtattatccaatacagaatgtctgtgattcgtgttaaaaccatcggagaaggaatagaaataaaaattattatagtggtggaattcagttggaatattgcctccggagtcataaaaggatactaaacattgttttttatcataaattacacatttccaatgagacaaataacaaaatccaaacattacaaatctagaggtagaacttttaattttgtctttaagtatatacgataagatatgtttattcataaacgcgtcaaatttttcatgaatcgctaaggagtttaagaatctcatgtcaaattgtcctatataatccacttcggatccataagcaaactgagagactaagttcttaatacttcgattgctcatccaggctcctctctcaggctctattttcatcttgacgacctttggattttcaccagtatgtattcctttacgtgataaatcatcgattttcaaatccatttgtgagaagtctatcgccttagatactttttcccgtagtcgaggtttaaagaaatacgctaacggtatactagtaggtaactcaaagacatcatatatagaatggtaacgcgtctttaactcgtcggttaactctttcttttgatcgagttcgtcgctactattgggtctgctcaggtgccccgactctactagttccaacatcataccgataggaatacaagacactttgccagcggttgtagatttatcatatttctccactacatatccgttacaatttgttaaaaatttagatacatctatattgctacataatccagctagtgaatatatatgacataataaattggtaaatcctagttctggtattttactaattactaaatctgtatatctttccatttatcatggaaaagaatttaccagatatcttcttttttccaaactgcgttaatgtattctcttacaaatattcacaagatgaattcagtaatatgagtaaaacggaacgtgatagtttctcattggcggtgtttccagttataaaacatagatggcataacgcacacgttgtaaaacataaaggaatatacaaagttagtacagaagcacgtggaaaaaaagtatctcctccatcactaggaaaacccgcacacataaacctaaccgcgaagcaatatatatacagtgaacacacaataagctttgaatgttatagttttctaaaatgtataacaaatacagaaatcaattcgttcgatgagtatatattaagaggactattagaagctggtaatagtttacagatattttccaattccgtaggtaaacgaacagatactataggtgtactagggaataagtatccatttagcaaaattccattggcctcattaactcctaaagcacaacgagagatattttcagcgtggatttctcatagacctgtagttttaactggaggaactggagtgggtaagacgtcacaggtacccaagttattgctttggtttaattatttatttggtggattctctactctagataaaatcactgactttcacgaaagaccagtcattctatctcttcctaggatagctttagttagattgcatagcaataccattttaaaatcattgggatttaaggtactagatggatctcctatttctttacggtacggatctataccggaagaattaataaacaaacaaccaaaaaaatatggaattgtattttctacccataagttatctctaacaaaactatttagttatggcactcttattatagacgaagttcatgagcatgatcaaataggagatattattatagcagtagcgagaaagcatcatacgaaaatagattctatgtttttaatgactgccacgttagaggatgacagggaacggctaaaagtatttttacctaatcccgcatttatacatattcctggagatacactgtttaaaattagcgaggtatttattcataataagataaatccatcttccagaatggcatacatagaagaagaaaagagaaatttagttactgctatacagatgtatactcctcctgatggatcatccggtatagtctttgtggcatccgttgcacagtgtcacgaatataaatcatatttagaaaaaagattaccgtatgatatgtatattattcatggtaaggtcttagatatagacgaaatattagaaaaagtgtattcatcacctaatgtatcgataattatttctactccttatttggaatccagcgttactatacacaatgttacacacatttatgatatgggtagagtttttgtccccgctccttttggaggatcgcaacaatttatttctaaatctatgagagatcaacgaaaaggaagagtaggaagagttaatcctggtacatacgtctatttctatgatctgtcttatatgaagtctatacagcgaatagattcagaatttctacataattatatattgtacgctaataagtttaatctaacactccccgaagatttgtttataatccctacaaatttggatattctatggcgtacaaaggaatatatagactcgttcgatattagtacagaaacatggaataaattattatccaattattatatgaagatgatagagtatgctaaactttatgtactaagtcctattctcgctgaggagttggataactttgagaggacgggagaattaactagtattgtacgagaagccattttatctctaaatttacgaattaagattttaaattttaaacataaagatgatgatacgtatatacacttttgtaaaatattattcggtgtctataacggaacaaacgctactatatattatcatagacctctaacgggatatatgaatatgatttcagatactatatttgttcctgtagataataactaaaaatcaaactctaatgaccacatctttttttagagatgaaaaattttctacatctccttttgtagacacgactaaacattttgcagaaaaaagtttattagtgtttagataatcgtatacttcatcagtgtagatagtaaatgtgaacagataaaaggtattcttgctcaatagattggtaaattccatagaatatattaatcctttcttcttgagatcccacatcatttcaaccagagacgttttatccaatgatttacctcgtactataccacatacaaaactagattttgcagtgacgtcgtacctggtattcctaccaaacaaaattttacttttagttcttttagaaaattctaaggtagaatctctatttgccaatatgtcatctatggaattaccactagcaaaaaatgatagaaatatatattgatacatcgcagctggttttgatctactatactttaaaaacgaatcagattccataattgcctgtatatcatcagctgaaaaactatgttttacacgtattccttcggcatttctttttaatgatatatcttgtttagacaatgataaagttatcatgtccatgagagacgcgtctccgtatcgtataaatatttcattagatgttagacgcttcattaggggtatacttctataaggtttcttaatcagtccatcattggttgcgtcaagaactactatcggatgttgttgggtatctctagtgttacacatggccttactaaagtttgggtaaataactatgatatctctattaattatagatgcatatatttcattcgtcaaggatattagtatcgacttgctatcgtcattaatacgtgtaatgtaatcatataaatcatgcgatagccaaggaaaatttaaatagatgttcatcatataatcgtcgctataattcatattaatacgttgacattgactaatttgtaatatagcctcgccacgaagaaagctctcgtattcagtttcatcgataaaggataccgttaaatataactggttgccgatagtctcatagtctattaagtggtaagtttcgtacaaatacagaatccctaaaatattatctaatgttggattaatctttaccataactgtataaaatggagacggagtcataactattttaccgtttgtacttactggaatagatgaaggaataatctccggacatgctggtaaagacccaaatgtctgtttgaagaaatccaatgttccaggtcctaatctcttaacaaaaattacgatattcgatcccgatatcctttgcattctatttaccagcatatcacgaactatattaagattatctatcatgtctattctcccaccgttatataaatcgcctccgctaagaaacgttagtatatccatacaatggaatacttcatttctaaaatagtattcgttttctaattctttaatgtgaaatcgtatactagaaagggaaaaattatctttgagttttccgttagaaaagaaccacgaaactaatgttctgattgcgtccgattccgttgctgaattaatggatttacaccaaaaactcatataacttctagatgtagaagcattcgctaaaaaattagtagaatcaaaggatataagtagatgttccaacaagtgagcaattcccaagatttcatctatatcattctcgaatccgaaattagaaattcccaagtagatatcctttttcatccgatcgttgatgaaaatacgaactttattcggtaagacaatcatttactaaggagtaaaataggaagtaatgttcgtatgtcgttatcatcgtataaattaaaggtgtgttttttaccattaagtgacattataattttaccaatattggaattataatataggtgtatttgcgcactcgcgacggttgatgcatcggtaaatatagctgtatctaatgttctagtcggtatttcatcatttcgctgtctaataatagcgttttctctatctgtttccattacagctgcctgaagtttattggtcggataatatgtaaaataataagaaatacatacgaataacaaaaataaaataagatataataaagatgccatttagagatctaattttgttcaacttgtccaaattcctacttacagaagatgaggaatcgttggagatagtgtcttccttatgtagaggatttgaaatatcttatgatgacttgataacttactttccagataggaaataccataaatatatttataaagtatttgaacatgtagatttatcggaggaattaagtatggaattccatgatacaactttgcgagatttagtttatcttagattgtacaagtattccaagtgtatacggccgtgttataaattaggagataatctaaaaggcatagttgttataaaggacaggaatatttatattagggaagcaaatgatgacttgatagaatatctcctcaaggaatacactcctcagatttatacatattctaatgagcgcgtccccataactggttcaaaattaattctttgtggattttctcaagttacatttatggcgtatacaacgtcgcatataacaacaaataaaaaggtagatgttctcgtttccaaaaaatgtatagatgaactagtcgatccaataaattatcaaatacttcaaaatttatttgataaaggaagcggaacaataaacaaaatactcaggaagatattttattcggtaaccggtggccaaactccataggtagctttttctatttcggattttagaatttccaaattcaccagcgatttatcggttttggtgaaatccaaggatttattaatgtccacaaatgccatttgttttgtctgtggattgtatttgaaaatggaaacgatgtagttagatagatgcgctgcgaagtttcctattagggttccgcgcttcacgtcacccagcatacttgaatcaccatcctttaaaaaaaatgataagatatcaacatggagtatatcatactcggattttaattcttctactgcatcactgacattttcacaaatactacaatacggtttaccgaaaataatcagtacgttcttcatttatgggtatcaaaaacttaaaatcgttactgctggaaaataaatcactgacgatattagatgataatttatacaaagtatacaatggaatatttgtggatacaatgagtatttatatagccgtcgccaattgtgtcagaaacttagaagagttaactacggtattcataaaatacgtaaacggatgggtaaaaaagggagggcatgtaaccctttttatcgatagaggaagtataaaaattaaacaagacgttagagacaagagacgtaaatattctaaattaaccaaggacagaaaaatgctagaattagaaaagtgtacatccgaaatacaaaatgttaccggatttatggaagaagaaataaaggcaaaaatgcaattaaaaatcgataaacttacatttcaaatatatttatctgattctgataacataaaaatatcattgaatgagatactaacacatttcaacaataatgagaatgttacattattttattgtgatgaacgagacgcagaattcgttatgtgtctcgaggctaaaacacatttctctaccacaggagaatggccgttgataataagtaccgatcaggatactatgctatttgcatctactgataatcatcctaagatgataaaaaacttaactcaactgtttaaatttgttccctcggcagaggataactatttagcaaaattaacggcgttagtgaatggatgtgatttctttcctggactctatggggcatctataacacccaccaacttaaacaaaatacaattgtttagtgattttacaatcgataatatagtcactagtttggcaattaaaaattattatagaaagactaactctaccgtagacgtgcgtaatattgttacgtttataaacgattacgctaatttagacgatgtctactcgtatgttcctccttgtcaatgcactgttcaagaatttatattttccgcattagatgaaaaatggaatgaatttaaatcatcttatttagagaccgttccgttaccctgtcaattaatgtacgcgttagaaccacgtaaggagattgatgtttcagaagttaaaactttatcatcttatatagatttcgaaaatactaaatcagatatcgatgttataaaatctatatcctcgatttttggatattctaacgaaaactgtaacacgatagtattcggcatctataaggataatttactactgagtataaataattcattttactttaacgatagtctgttaataaccaatactaaaagtgataatataataaatataggttactagattaaaaatggtgttccaactcgtgtgctctacatgcggtaaagatatttctcacgaacgatataaattgattatacgaaaaaaatcattaaaggatgtactcgtcagtgtaaagaacgaatgttgtaggttaaaattatctacacaaatagaacctcaacgtaacttaacagtgcaacctctattggatataaactaatatggatccggttaattttatcaagacatatgcgcctagaggttctattatttttattaattataccatgtcattaacaagtcatttgaatccatcgatagaaaaacatgtgggtatttattatggtacgttattatcggaacacttggtagttgaatctacctatagaaaaggagttcgaatagtcccattggatagtttttttgaaggatatcttagtgcaaaagtatacatgttagagaatattcaagttatgaaaatagcagctgatacgtcattaactttattgggtattccgtatggatttggtcatgatagaatgtattgttttaaattggtagctgactgttataaaaatgccggtgttgaaacatcgtctaaacgaatattaggtaaagatatttttctgagccaaaacttcacagacgataatagatggataaagatatatgattctaataatttaacattttggcaaattgattaccttaaagggtgagttaatatgcataactactcctccgttgttttttccctcgttctttttcttaacgttgtttgccatcactctcataatgtaaagatattctaaaatggtaaacttttgcatatcggacgcagaaattggtataaatgttgtaattgtattatttcccgtcaatggactagtcacagctccatcagttttatatcctttagagtatttctcactcgtgtctaacattctagagcattccatgatctgtttatcgttgatattggccggaaagatagattttttattttttattatattactattggcaattgtagatataacttctggtaaatatttttctaccttttcaatctcttctattttcaagccggctatatattctgctatattgttgctagtatcaataccttttcttgctaagaagtcatatgtggtattcactatatcagttttaactggtagttccattagcctttccacttctgcagaataatcagaaattggttctttaccagaaaatccagctactataataggctcaccgatgatcattggcaaaatcctatattgtaccagattaatgagagcatatttcatttccaataattctgctagttcttgagacattgatttatttgatgaatctagttggttctctagatactctaccatttctgccgcatacaataacttgttagataaaatcagggttatcaaagtgtttagcgtggctagaatagtgggcttgcatgtattaaagaatgcggtagtatgagtaaaccgttttaacgaattatatagtctccagaaatctgtggcgttacatacatgagccgaatgacatcgaagattgtccaatatttttaatagctgctctttgtccattatttctatatttgactcgcaacaattgtagataccattaatcactgattcctttttcgatgccggacaatagcacaattgtttagctttggactctatgtattcagaattaatagatatatctcttaatacagattgcactatacattttgaaactatgtcaaaaattgtagaacgacgctgttctgcagccatttaactttaaataatttacaaaaatttaaaatgagcatccgtataaaaatcgataaactgcgccaaattgtggcatatttttcagagttcagtgaagaagtgtctataaatgtagactcgacggatgagttaatgtatatttttgccgccttgggcggatctgtaaacatttgggccattatacctctcagtgcatcagtgttctaccgcggagccgaaaatattgtgtttaatcttccggtgtccaaggtaaaatcgtgtttgtgtagttttcacaatgatgccatcatagatatagaacctgatctggaaaataatctagtaaaactttctagttatcatgtagtaagtgtcgattgtaacaaggaactgatgcctattaggacagatactactatttgtctaagtatagatcaaaagaaatcttacgtgtttaattttcacaagtatgaagaaaaatgttgtggtagaaccgtcattcatttagaatggttgttgggctttatcaagtgtattagtcagcatcagcatttggctattatgtttaaagatgacaatattattatgaagactcctggtaatactgatgcgttttccagggaatattctatgactgaatgttctcaagaactacaaaagttttctttcaaaatagctatctcgtctctcaacaaactacgaggattcaaaaagagagtcaatgtttttgaaactagaatcgtaatggataatgacgataacattctaggaatgttgttttcggatagagttcaatcctttaagatcaacatctttatggcgtttttagattaatactttcaatgagataaatatgggtggcggagtaagtgttgagctccctaaacgggatccgcctccgggagtacccactgatgagatgttattaaacgtggataaaatgcatgacgtgatagctcccgctaagcttttagaatatgtgcatataggaccactagcaaaagataaagaggataaagtaaagaaaagatatccagagtttagattagtcaacacaggacccggtggtctttcggcattgttaagacaatcgtataatggaaccgcacccaattgctgtcgcacttttaatcgtactcattattggaagaaggatggaaagatatcagataagtatgaagagggtgcagtattagaatcgtgttggccagacgttcacgacactggaaaatgcgatgttgatttattcgactggtgtcagggggatacgttcgatagaaacatatgccatcagtggatcggttcagcctttaataggagtgatagaactgtagagggtcaacaatcgttaataaatctgtataataagatgcaaacattatgtagtaaagatgctagtgtaccaatatgtgaatcatttttgcatcatttacgcgcacacaatacagaagatagcaaagagatgatcgattatattctaagacaacagtctgcggactttaaacagaaatatatgagatgtagttatcccactagagataagttagaagagtcattaaaatatgcggaacctcgagaatgttgggatccagagtgttcgaatgccaatgttaatttcttactaacacgtaattataataatttaggactttgcaatattgtacgatgtaatactagcgtgaacaacttacagatggataaaacttcctcattaagattgtcatgtggattaagcaatagtgatagattttctactgttcccgtcaatagagcaaaagtagttcaacataatattaaacattcgttcgacctaaaattgcatttgatcagtttattatctctcttggtaatatggatactaattgtagctatttaaatgggtgccgcggcaagcatacagacgacggtgaatacactcagcgaacgtatctcgtctaaattagaacaagaagcgaacgctagtgctcaaacaaaatgtgatatagaaatcggaaatttttatatccgacaaaaccatggatgtaacctcactgttaaaaatatgtgctctgcggacgcggatgctcagttggatgctgtgttatcagccgctacagaaacatatagtggattaacaccggaacaaaaagcatacgtgccagctatgtttactgctgcgttaaacattcagacaagtgtaaacactgttgttagagattttgaaaattatgtgaaacagacttgtaattctagcgcggtcgtcgataacaaattaaagatacaaaacgtaatcatagatgaatgttacggagccccaggatctccaacaaatttggaatttattaatacaggatctagcaaaggaaattgtgccattaaagcgttgatgcaattgacgactaaggccactactcaaatagcacctagacaagttgctggtacaggagttcagttttatatgattgttatcggtgttataatattggcagcgttgtttatgtactatgccaagcgtatgctgttcacatccaccaatgataaaatcaaacttattttagccaataaggaaaacgtccattggactacttacatggacacattctttagaacttctccgatggttattgctaccacggatatacaaaactgaaaatatattgataatattttaatagattaacatggaagttatcgctgatcgtctagacgatatagtgaaacaaaatatagcggatgaaaaatttgtagattttgttatacacggtctagagcatcaatgtcctgctatacttcgaccattaattaggttgtttattgatatactattatttgttatagtaatttatatttttacggtacgtctagtaagtagaaattatcaaatgttgttggtggcgctagtcatcacattaactattttttattactttatactataatagtactagactgacttctaacaaacatctcacctgccataaataaatgcttgatattaaagtcttctatttctaacactattccatctgtggaaaataatactctgacattatcgctaattgacacatcggtgagtgatatgcctataaagtaataatcttctttgggcacatataccagtgtaccaggttctaacaacctatttactggtgctcctgtagcatactttttctttaccttgagaatatccatcgtttgcttggtcaatagcgatatgtgattttttatcaaccactcgaaaaagtaattggagtgttcatatcctctacgggctattgtctcatggccgtgtatgaaatttaagtaacacgactgtggtagatttgttctatagagccggttgccgcaaatagatagaactaccaatatgtctgtacaaatgttaaacattaattgattaacagaaaaaacaatgttcgttctgggaatagaaaccagatcaaaacaaaattcgttagaatatatgccacgtttatacattgaatataaaataactacagtttgaaaaataacagtatcatttaaacatttaacttgcggggttaatctcacaactttactgtttttaaactgttcaaaatatagcatcgatccatgagaaatacgtttagccgcctttaatagaggaaatcccaccgcctttctggatctcaccaacgacgatagttctgaccagcaactcatttcttcatcatccacctgttttaacatataataggcaggagatagatatccgtcattgcaatattccttctcgtaggcacacaatctaatattgataaaatctccattctcttctctgcatttattatcttgtttcggtggctgattaggctgtagtcttggtttaggctttggtatatcgttgttgaatctattttggtcattaaatctttcatttcttcctggtatatttttatcacctcgtttggttggatttttgtctatattatcgtttgtaacatcggtacgggtattcatttatcacaaaaaaaacttctctaaatgagtctactgctagaaaacctcatcgaagaagataccatattttttgcaggaagtatatctgagtatgatgatttacaaatggttattgccggcgcaaaatccaaatttccaagatctatgctttctatttttaatatagtacctagaacgatgtcaaaatatgagttggagttgattcataacgaaaatatcacaggagcaatgtttaccacaatgtataatataagaaacaatttgggtctaggagatgataaactaactattgaagccattgaaaactatttcttggatcctaacaatgaagttatgcctcttattattaataatacggatatgactgccgtcattcctaaaaaaagtggtaggagaaagaataagaacatggttattttccgtcaaggatcatcacctatcttgtgtattttcgaaactcgtaaaaagattaatatttataaagaaaatatggaatccgcatcgactgagtatacacctatcggagacaacaaggctttgatatctaaatatgcgggaattaatatcctaaatgtgtattctccttccacatccataagattgaatgccatttacggattcaccaataaaaataaactagagaaacttagtactaataaggaactagaatcgtatagttctagccctcttcaagaacccattaggttaaatgattttctgggactattggaatgtgttaaaaagaatattcctctaacagatattccgacaaaggattgattactataaatggagaatgttcctaatgtatactttaatcctgtgtttatagagcccacgtttaaacattctttattaagtgtttataaacacagattaatagttttatttgaagtattcgttgtattcattctaatatatgtattttttagatctgaattaaatatgttcttcatgcctaaacgaaaaatacccgatcctattgatagattacgacgtgctaatctagcgtgtgaagacgataaattaatgatctatggattaccatggatgacaactcaaacatctgcgttatcaataaatagtaaaccgatagtgtataaagattgtgcaaagcttttgcgatcaataaatggatcacaaccagtatctcttaacgatgttcttcgcagatgatgattcattttttaagtatttggctagtcaagatgatgaatcttcattatctgatatattgcaaatcactcaatatctagactttctgttattattattgatccaatcaaaaaataaattagaagccgtgggtcattgttatgaatctctttcagaggaatacagacaattgacaaaattcacagactttcaagattttaaaaaactgtttaacaaggtccctattgttacagatggaagggtcaaacttaataaaggatatttgttcgactttgtgattagtttgatgcgattcaaaaaagaatcctctctagctaccaccgcaatagatcctattagatacatagatcctcgtcgcgatatcgcattttctaacgtgatggatatattaaagtcgaataaagtgaacaataattaattctttattgtcatcatgaacggcggacatattcagttgataatcggccccatgttttcaggtaaaagtacagaattaattagacgagttggtaccatttttattaggcgtcacgttaccaataaaaaacaaaaaaataaattaactaattagcgatgatataatataatcatgttcatcatgagggaatctatctatcgcgtgatgattgtaatcctgtacttgagtcttatttcaagttttttggtaatatgcagcatggaacacggatatttccaggagggcattagtagatttaagatttgcccgtatcactggtacaaacaacacatgagcttgctcttcagaaggtactaccataaactggatagcattatatgagcttgactaatttttatcaataatacaaaaaaatgaaataaaaccgtctattatacgctggttaccgctattagctctaaccattttcaggatgcggtccctcgttatcgttcttctctttcctagtatcatctatagcatggtcataaggcggtgtgaaaagatggaagaagagacgtggaagcttaaaataggtatgtgtatccaggctaaggacttctacagtaagagaacagattgttcagtgcataggcccgacgtaggcggcgggttgattaccgagggaaacggttacagggtagtcgtacacgatcaatgcgaagagcctaatccgttcatcatagccacaaccaagcaaactcacttcggcgttacgcattcctatatcgaattctcaaacagcaacacgggtgctccagaaaacattccagactgttccaagcacatccttatctctgtttattgtgaccaagaagcgtcaggtctggactttcacaccctgaagtatgtggaatcaaattatctccatataactgtaaagtatgacacaagctgcataaaccatttgggagtcaactatagttttatgaacgaatgcgagaggaagctcacctccatttatgaaaccgacacccttacttgcggtgcgaaagacattcaaaccagggataagtatctcaagacgtgtaccaacaccaaattcgaccgatcagtctataaaacccacatgcagaagtccaagatccttcacgtcaagaccgaactctaaccactatcactaatcatcaagcaatttttataacttcagcgatattgccgacattaaatcatctgaattaatttcttgtattcttcagtagtatacgtatttatttattgtcggatatataaatcatacaacaatgcacctccagtattatgcgatttcattggtctcactggtaagtcttatcgactgtcataaactggcgtttaattttaatctcgaaatcaacggatccgacacccactcaaccgtcgacgtatatcttgatgattcacagattattacgtttgatggcaaagacattagaccgactattccgtttatgattggcgatgagatatttttgcctttctacaagaatgtgttcagcgaattcttctctttgtttaggcgcgtccctacgagtaccccgtatgaggatctgacgtacttttatgagtgcgattacacagataataaaagcacattcgaccaattttacctctacaatggagaggaatacaccgtaaagactcaggaagcgactaacaagaacatgtggttgactacttccgaattccggctgaaaaaatggtttgatggtgaggactgcataatgcacctgcggagtttggtaaggaaaatggaagacagcaaacgcaatacagggtagttataaatattttcataatcagagctcggaggtaatgatatgtatcaatcggtgtgtagaaagtgttacatcgactcataatattatattttttatctaaaaaactaaaaataaacattgattaaattttaatataatacttaaaaatggatgttgtgtcgttagataaaccgtttatgtattttgaggaaattgataatgagttagattacgaaccagaaagtgcaaatgaggtcgcaaaaaaactaccgtatcaaggacagttaaaactattactaggagaattattttttcttagtaagttacagcgacacggtatattagatggtgccaccgtagtgtatataggatcggctcctggtacacatatacgttatttgagagatcatttctataatttaggagtgatcatcaaatggatgctaattgacggccgccatcatgatcctattttaaatggattgcgtgatgtgactctagtgactcggttcgttgatgaggaatatctacgatccatcaaaaaacaactgcatccttctaagattattttaatttctgatgtaagatccaaacgaggaggaaatgaacctagtacggcggatttactaagtaattacgctctacaaaatgtcatgattagtattttaaaccccgtggcatctagtcttaaatggagatgcccgtttccagatcaatggatcaaggacttttatatcccacacggtaataaaatgttacaaccttttgctccttcatattcagctgaaatgagattattaagtatttataccggtgagaacatgagactgactcgagttaccaaattagacgctgtaaattatgaaaaaaagatgtactaccttaataagatcgtccgtaacaaagtagttgttaactttgattatcctaatcaggaatatgactattttcacatgtactttatgctgaggaccgtgtactgcaataaaacatttcctactactaaagcaaaggtactatttctacaacaatctatatttcgtttcttaaatattccaacaacatcaactgaaaaagttagtcatgaaccaatacaacgtaaaatatctagcaaaaattctatgtctaaaaacagaaatagcaagagatccgtacgcggtaataaatagaaacgtgctactgagatatactaccgatatagagtataatgatttagttactttaataaccgttagacataaaattgattctatgaaaactgtgtttcaggtatttaacgaatcatccataaattatactccggttgatgatgattatggagaaccaatcattataacatcgtatcttcaaaaaggtcataacaagtttcctgtaaattttctatacatagatgtggtaatatctgacttatttcctagctttgttagactagatactacagaaactaatatagttaatagtgtactacaaacaggcgatggtaaaaagactcttcgtcttcccaaaatgttagagacggaaatagttgtcaagattctctatcgccctaatataccattaaaaattgttagatttttccgcaataacatggtaactggagtagagatagccgatagatctgttatttcagtcgctgattaatcaattagtagagatgagataagaacattataataatcaataatattatcttatatctcgtttagaaaaatgctaatattaaaatagctaacgctagtaatccaatcggaagccatttgatatctataatagggtatctaatttcctgattcagatagcggacagctatattctcggtagctactcgtttggaatcacaaacattatttacatctaatttactatctgtaatggaaacgtttcccaatgaaatggtacaatccgatacattgcattttgttatatttttttttaaagaggctggtaacaacgcatcgcttcgtttacatggctcgtaccaacaataatagggtaatcttgtatctattcctatccgtactatgcttttatcaggataaatacatttacatcgtatatcgtctttgttagcatcacagaatgcataaatttgttcgtccgtcatgataaaaatttaaagtgtaaatataactattatttttatagttgtaataaaaagggaaatttgattgtatactttcggttctttaaaagaaactgacttgataaaaatggctgtaatctctaaggttacgtatagtctatatgatcaaaaagagattaatgctacagatattatcattagtcatgttaaaaatgacgacgatatcggtaccgttaaagatggtagactaggtgctatggatggggcattatgtaaaacttgtgggaaaacggaattggaatgtttcggtcactggggtaaagtaagtatttataaaactcatatagttaagcctgaatttatttcagaaattattcgtttactgaatcatatatgtattcactgcggattattgcgttcacgagaaccgtattccgacgatattaacctaaaagagttatcgggacacgctcttaggagattaaaggataaaatattatccaagaaaaagtcatgttggaacagcgaatgtatgcaaccgtatcaaaaaattactttttcaaagaaaaaggtttgtttcgtcaacaagttggatgatattaacgttcctaattctctcatctatcaaaagttaatttctattcatgaaaagttttggccattattagaaattcatcaatatccagctaacttattttatacagactactttcccatccctccgctgattattagaccggctattagtttttggatagatagtatacccaaagagaccaatgaattaacttacttattaggtatgatcgttaagaattgtaacttgaatgctgatgaacaggttatccagaaggcggtaatagaatacgatgatattaaaattatttctaataacactaccagtatcaatttatcatatattacatccggcaaaaataatatgattagaagttatatcgtcgcccgacgaaaagatcagaccgctagatctgtaattggtcccagtacatctatcaccgttaatgaggtaggaatgcccgcatatattagaaatacacttacagaaaagatatttgttaatgcctttacagtggataaagttaaacaactattagcgtcaaaccaagttaaattttactttaataaacgattaaaccaattaacaagaatacgccaaggaaagtttatcaaaaataaaatacatttattgcctggtgattgggtagaagtagctgttcaagaatatacaagtattatttttggaagacagccgtctctacatagatacaacgtcatcgcttcatctatcagagctaccgaaggagatactatcaaaatatctcccggaattgccaactctcaaaatgctgatttcgacggagatgaagaatggatgatattggagcaaaatcctaaagccgtaattgaacaaagtattcttatgtatccgacgacgttactcaaacacgatattcatggagcccccgtttatggatctattcaagatgaaatcgtagcagcgtattcattgtttaggatacaagatctttgtttagatgaagtattgaacatcttggggaaatatggaagagagttcgatcctaaaggtaaatgtaaattcagcggtaaagatatctatacttacttgataggtgaaaagattaattatccgggtctcttaaaggatggtgaaattattgcaaacgacgtagatagtaattttgttgtggctatgaggcatctgtcattggctggactcttatccgatcataagtcgaacgtggaaggtatcaactttattatcaagtcatcttatgtttttaagagatatctatctatttacggttttggggtgacattcaaagatctgagaccaaattcgacgttcactaataaattggaggccatcaacgtagaaaaaatagaacttatcaaagaagcatacgccaaatatctcaacgatgtaagagacgggaaaatagttccattatctaaagctttagaggcggactatgtggaatccatgttatccaacttgacaaatcttaatatccgagagatagaagaacatatgagacaaacgctgatagatgatccagataataacctcctgaaaatggccaaagcgggttataaagtaaatcctacagaactaatgtatattctaggtacgtatggacaacaaaggattgatggtgaaccagcagagactcgagtattgggtagagtcttaccttactatcttccagactctaaggatccagaaggaagaggttacattcttaattctttaacaaaaggattaacgggttctcaatattacttttcgatgctggttgccagatctcaatctactgatatcgtctgtgaaacatcacgtaccggaacactggctagaaaaatcattaaaaagatggaggatatggtggtcgacggatacggacaagtagttataggtaatacgctcatcaagtacgccgccaattataccaaaattctaggctcagtatgtaaacctgtagatcttatctatccagatgagtccatgacttggtatttggaaattagtgctctgtggaataaaataaaacagggattcgtttactctcagaaacagaaacttgcaaagaagacattggcgccgtttaatttcctagtattcgtcaaacccaccactgaggataatgctattaaggttaaggatctgtacgatatgattcataacgtcattgatgatgtgagagagaaatacttctttacggtatctaatatagattttatggagtatatattcttgacgcatcttaatccttctagaattagaattacaaaagaaacggctatcactatctttgaaaagttctatgaaaaactcaattatactctaggtggtggaactcctattggaattatttctgcacaggtattgtctgagaagtttacacaacaagccctgtccagttttcacactactgaaaaaagtggtgccgtcaaacaaaaacttggtttcaacgagtttaataacttgactaatttgagtaagaataagaccgaaattatcactctggtatccgatgatatctctaaacttcaatctgttaagattaatttcgaatttgtatgtttgggagaattaaatccagacatcactcttcgaaaagaaacagataaatatgtagtagatataatagttaatagattatacatcaagagagcagaaataaccgaattagttgtcgaatatatgattgaacgatttatctcctttagcgtcattgtaaaggaatggggtatggagacattcattgaggacgaggataatattagatttactgtctacctaaatttcgttgaaccggaagaattgaatcttagtaagtttatgatggttcttccgggtgccgccaacaagggcaagattagtaaattcaagattcctatctctgattatacgggttatgacgacttcaatcaaacaaaaaagctcaataagatgactgtagaactcatgaatctaaaagaattgggttctttcgatttggaaaacgtcaacgtgtatcctggagtatggaatacatacgatatcttcggtatcgaggccgctcgtgaatacttgtgcgaagccatgttaaacacctatggagaagggttcgattatctgtatcagccttgtgatcttctcgctagtttactatgtgctagttacgaaccagaatcagttaataaattcaagttcggtgcagctagtactcttaagagagctacgttcggagacaataaagcattgttaaacgcggctcttcataaaaagtcagaacctattaacgataatagtagctgccacttttttagcaaggtccctaatataggaactggatattacaaatactttatcgacttgggtcttctcatgagaatggaaaggaaactatctgataagatatcttctcaaaagatcaaggaaatggaagaaacagaagacttttaattcttatcaataacatatttttctatgatctgtcttttaaacgatggattttccacaaatgcgcctctcaagtccctcatagaatgatacacgtataaaaaatatagcataggcaatgactccttatttttagacattagatatgccaaaatcatagccccgcttctatttactcccgcagcacaatgaaccaacacgggctcgtttcgttgatcacatttagataaaaaggcggttacgtcgtcaaaatatttactaatatcggtagttgtatcatctaccaacggtatatgaataatattaatattagagttaggtaatgtatatttatccatcgtcaaatttaaaacatatttgaacttaacttcagatgatggtgcatccatagcatttttataatttcccaaatacacattattggttacccttgtcattatagtgggagatttggctttgtgcatatctccagttgaacgtagtagtaagtatttatacaaacttttcttatccatttataacgtacaaatggataaaactactttatcggtaaacgcgtgtaatttagaatacgttagagaaaaggctatagtaggcgtacaagcagccaaaacatcaacacttatattctttgttattatattggcaattagtgcgctattactctggtttcagacgtctgataatccagtctttaatgaattaacgagatatatgcgaattaaaaatacggttaacgattggaaatcattaacggatagcaaaacaaaattagaaagtgatagaggtagacttctagccgctggtaaggatgatatattcgacttcaaatgtgtggatttcggcgcctattttatagctatgcgattggataagaaaacatatctgccgcaagctattaggcgaggtactggagacgcgtggatggttaaaaaggcggcaaaggtcgatccatctgctcaacaattttgtcagtatttgataaaacacaagtctaataatgttattacttgtggtaatgagatgttaaatgaattaggttatagcggttattttatgtcaccgcattggtgttccgattttagtaatatggaatagtgttagataaatgcggtaacgaatgttcctgtaaggaaccataacagtttagatttaacgttaaagatgagcataaacataataaacaaaattacaatcaaacctataacattaatatcaaacaatccaaaaaatgaaatcagtggagtagtaaacgcgtacataactcctggataacgtttagcagctgccgttcctattctagaccaaaaattcggtttcatgttttcgaagcggtgttctgcaacaagtcggggatcgtgttctacatatttggcggcgttatccagtatctgcctattgatcttcatttcgttttcgattctggctatttcaaaataaaatcccgatgatagacctccagactttataatttcatctacgatgttcagcgccgtagtaactctaataatataggctgataagctaacatcataccctcctgtatatgtgaatatggcatgatttttgtccattacaagctcggttttaactttattgcctgtaataatttctctcatctgtaggatatctatttttttgtcatgcattgccttcaagacgggacgaagaaacgtaatatcctcaataacgttatcgttttctacaataactacatattctacctttttattttctaactcggtaaaaaaattagaatcccatagggctaaatgtctagcgatatttcttttcgtttcctctgtacacatagtgttacaaaaccctgaaaagaagtgagtatacttgtcatcatttctaatgtttcctccagtccactgtataaacgcataatccttgtaatgatctggatcatccttgactaccacaacatttcttttttctggcataacttcgttgtcctttacatcatcgaacttctgatcattaatatgctcatgaacattaggaaatgtttctgatggaggtctatcaataactggcacaacaataacaggagttttcaccgccgccatttagttattgaaattaatcatatacaactctttaatacgagttatattttcgtctatccattgtttcacatttacatatttcgacaaaaagatataaaatgcgtattccaatgcttctctgtttaatgaattactaaaatatacaaacacgtcactgtctggcaataaatgatatcttagaatattgtaacaatttattttgtattgcacatgttcgtgatctatgagttcttcttcgaatggcataggatctccgaatctgaaaacgtataaataggagttagaataataatatttgagagtattggtaatatataaactctttagcggtataattagtttttttctctcaatttctatttttagatgtgatggaaaaatgactaattttgtagcattagtatcatgaactctaatcaaaatcttaatatcttcgtcacacgttagctctttgaagtttttaagagatgcatcagttggttctacagatggagtaggtgcaacaattttttgttctacacatgtatgtactggagccattgttttaactataatggtgcttgtatcgaaaaactttaatgcagatagcggaagctcttcgccgcgactttctacatcgtaattgggttctaacgccgatctctgaatggatactagttttctaagttctaatgtgattctctgaaaatgtaaatccaattcctccggcattatagatgtgtatacatcggtaaataaaactatagtatccaacgatcccttctcgcaaattctagtcttaaccaaaaaatcgtatataaccacggagatggcgtatttaagagtggattcttctaccgttttgttcttggatgtcatataggaaactataaagtccgcactactgttaagaatgattactaacgcaactatatagttcaaattaagcattttggaaacataaaataactctgtagacgatacttgactttcgaataagtttgcagacaaacgaagaaagaacagacctctcttaatttcagaagaaaactttttttcgtattcctgacgtctagagtttatatcaataagaaagttaagaattagtcggttaatgttgtatttcattacccaagtttgagatttcataatattatcaaaagacatgataatattaaagataaagcgctgactatgaacgaaatagctatatggttcgctcaagaatatagtcttgttaaacgtggaaacgataactgtatttttaatcacgtcagcggcatctaaattaaatataggtatatttattccacacactctacaatatgccacaccatcttcataataaataaattcgttagcaaaattattaattttagtgaaatagttagcgtcaactttcatagcttccttcaatctaatttgatgctcacacggtgcgaattccactctaacatcccttttccatgcctcaggttcatcgatctctataatatctagtttcttgcgtttcacaaacacgggctcgtctctcgcgatgagatctgtatagtaactatgtaaatgataactagatagaaagatgtagctatatagatgacgatcctttaagagaggtataataactttaccccaatcagataaactattgttatggtcttcggaaaaagaatttttataaatttttccagtattttccaaatatacgtacttgacatctaaaaaatccttaatgataataggaatggataatccgtctattttataaagaaatacatatcgcacattatacttttttttggaaatgggaataccgatgtgtctacataaatatgcaaagtctaaatattttttagagaatcttagttggtccaaattcttttccaagtacggtaatagatttttcatattgaacggtatcttcttaatctctggttctagttccgcattaaatgatgaaactaagtcactatttttataactaacgattacatcacctctaacatcatcatttaccagaatactgatcttcttttgtcgtaaatacatgtctaatgtgttaaaaaaaagatcatacaagttatacgtcatttcatctgtggtattcttgtcattgaaggataaactcgtactaatctcttctttaacagcctgttcaaatttatatcctatatacgaaaaaatagcaaccagtgtttgatcatccgcgtcaatattctgttctatcgtagtgtataacaatcgtatatcttcttctgtgatagtcgatacgttataaaggttgataacgaaaatatttttatttcgtgaaataaagtcatcgtaggattttggacttatattcgcgtctagtagatatgcttttatttttggaatgatctcaattagaatagtctctttagagtccatttaaagttacaaacaactaggaaattggtttatgatgtataatttttttagtttttatagattctttattctatacttaaaaaatgaaaataaatacaaaggttcttgagggttgtgttaaattgaaagcgagaaataatcataaattatttcattatcgcgatatccgttaagtttgtatcgtaatggcgtggtcaattacaaataaagcggatactagtagcttcacaaagatggctgaaatcagagctcatctaaaaaatagcgctgaaaataaagataaaaacgaggatattttcccggaagatgtaataattccatctactaagcccaaaaccaaacgagccactactcctcgtaaaccagcggctactaaaagatcaaccaaaaaggaggaagtggaagaagaagtagttatagaggaatatcatcaaacaactgaaaaaaattctccatctcctggagtcagcgacattgtagaaagcgtggccgctgtagagctcgatgatagcgacggggatgatgaacctatggtacaagttgaagctggtaaagtaaatcatagtgctagaagcgatctttctgacctaaaggtggctaccgacaatatcgttaaagatcttaagaaaattattactagaatctctgcagtatcgacggttctagaggatgttcaagcagctggtatctctagacaatttacttctatgactaaagctattacaacactatctgatctagtcaccgagggaaaatctaaagttgttcgtaaaaaagttaaaacttgtaagaagtaaatgcgtgcacttttttataaagatggtaaactctttaccgataataattttttaaatcctgtatcagacgataatccagcgtatgaggttttgcaacatgttaaaattcctactcatttaacagatgtagtagtatatgaacaaacgtgggaggaggcgttaactagattaatttttgtgggaagcgattcaaaaggacgtagacaatacttttacggaaaaatgcatgtacagaatcgcaacgctaaaagagatcgtatttttgttagagtatataacgttatgaaacgaattaattgttttataaacaaaaatataaagaaatcgtccacagattccaattatcagttggcggtttttatgttaatggaaactatgttttttattagatttggtaaaatgaaatatcttaaggagaatgaaacagtagggttattaacactaaaaaataaacacatagaaataagtcccgatgaaatagttatcaagtttgtaggaaaggacaaagtttcacatgaatttgttgttcataagtctaatagactatataagccgctattgaaactgacggatgattctagtcccgaagaatttctgttcaacaaactaagtgaacgaaaggtatacgaatgtatcaaacagtttggtattagaatcaaggatctccgaacgtatggagtcaattatacgtttttatataatttttggacaaatgtaaagtccatatctcctcttccatcaccaaaaaagttaatagcgttaactatcaaacaaactgctgaagtggtaggtcatactccatcaatttcaaaaagagcttacatggcaacgactattttagaaatggtaaaggataaaaattttttagatgtagtatctaaaactacgttcgatgaattcctatctatagtcgtagatcacgttaaatcatctacggatggatgatatagatctttacacaaataattacaagaccgataaatggaaatggataagcgtatgaaatctctcgcaatgacagctttcttcggagagctaaacacattagatattatggcattgataatgtctatatttaaacgccatccaaacaataccattttttcagtggataaggatggtcagtttatgattgatttcgaatacgataattataaggcttctcaatatttggatctgaccctcactccgatatctggagatgaatgcaagactcacgcatcgagtatagccgaacaattggcgtgtgtggatattattaaagaggatattagcgaatatatcaaaactactccccgtcttaaacgatttataaaaaaataccgcaatagatcagatactcgtatcagtcgagatacagaaaagcttaaaatagctctagctaaaggcatagattacgaatatataaaagacgcttgttaataagtaaatgaaaaaaaactagtcgtttataataaaacacaatatggatgccaacatagtatcatcttctactattgcaacgtatatagacgctttagcaaagaatgcttcagaattagaacagaggtctaccgcatacgaaataaataatgaattggaactagtatttattaagccgccattaattactttgacaaatgtagtgaatatctctacgattcaggaatcgtttattcgatttaccgttactaataaggaaggtgtcaaaattagaactaagattccattatctaaggtacatggtctagatgtaaaaaatgtacagttagtagatgctatagataacatagtttgggaaaagaaatcattagtgacggaaaatcgtcttcacaaagaatgcttgttgagactatcgacagaggaacgtcatatatttttggattacaagaaatatggatcctctatccgactagaattagtcaatcttattcaagcaaaaacaaaaaactttacgatagactttaagctaaaatattttctaggatccggtgcccaatctaaaagttctttgttgcacgctattaatcatccaaagtcaaggcctaatacatctctggaaatagaattcacacctagagacaatgaaaaagttccatatgatgaactaataaaggaattgacgactctatcacgtcatatatttatggcttctccagagaatgtaattctttctccgcctattaacgcacctataaagacttttatgttgcctaaacaagatatagtaggtctggatctggaaaatctatatgccgtaactaagactgacggcattcctataactatcagagttacatcaaacgggttgtattgttattttacacatcttgggtatattattagatatccagttaagagaataatagattccgaagtagtagtctttggtgaggcagttaaggataagaactggaccgtatatctcattaagctaatagagcctgtgaatgcaatcaatgatagactagaagaaagtaagtatgttgaatctaaactagtggatatttgtgatcggatagtattcaagtcaaagaaatatgaaggtccgtttactacaactagtgaagtcgtcgatatgttatctacatatttaccaaagcaaccagaaggtgttattctgttctattcaaagggacctaaatctaacattgattttaaaattaaaaaggaaaatactatagaccaaactgcaaatgtagtatttaggtacatgtccagtgaaccaattatctttggagaatcgtctatctttgtagagtataagaaatttagcaacgataaaggctttcctaaagaatatggttctggtaagattgtgttatataacggcgttaattatctaaataatatctattgtttggaatatattaatacacataatgaagtgggtattaagtccgtggttgtacctattaagtttatagcagaattcttagttaatggagaaatacttaaacctagaatcgataaaaccatgaaatatattaactcagaagattattatggaaatcaacataatatcatagtcgaacatttaagagatcaaagcatcaaaataggagatatctttaacgaggataaactatcggatgtgggacatcaatacgccaataatgataaatttagattaaatccagaagttagttattttacgaataaacgaactagaggaccgttgggaattttatcaaactacgtcaagactcttcttatttctatgtattgttccaaaacatttttagacgattccaacaaacgaaaggtattggcgattgattttggaaacggtgctgacctggaaaaatacttttatggagagattgcgttattggtagcgacggatccggatgctgatgctatagctagaggaaatgaaagatacaacaaattaaactctggaattaaaaccaagtactacaaatttgactacattcaggaaactattcgatccgatacatttgtctctagtgtcagagaagtattctattttggaaagtttaatatcatcgactggcagtttgctatccattattcttttcatccgagacattatgctaccgtcatgaataacttatccgaactaactgcttctggaggcaaggtattaatcactaccatggacggagacaaattatcaaaattaacagataaaaagacttttataattcataagaatttacctagtagcgaaaactatatgtctgtagaaaaaatagctgatgatagaatagtggtatataatccatcaacaatgtctactccaatgactgaatacattatcaaaaagaacgatatagtcagagtgtttaacgaatacggatttgttcttgtagataacgttgatttcgctacaattatagaacgaagtaaaaagtttattaatggcgcatctacaatggaagatagaccgtctacaaaaaactttttcgaactaaatagaggagccattaaatgtgaaggtttagatgtcgaagacttacttagttactatgttgtttatgtcttttctaagcggtaaataataatatggtatgggttctgatatccccgttctaaatgcattaaataattccaatagagcgatttttgttcctataggaccttccaactgtggatactctgtattgttaatagatatattaatacttttgtcgggtaacagaggttctacgtcttctaaaaataaaagtttgataacatctggcctgttcataaataaaaacttggcgattctatatatactcttattatcaaatctagccattgtcttatagatgtgagctactgtaggtgtaccatttgattttctttctaatactatatatttctctcgaagaagttcttgcacatcatctgggaataaaatactactgttgagtaaatcagttattttttttatatcgatattgatggacatttttatagttaaggataataagtatcccaaagtcgataacgacgataacgaagtatttatacttttaggaaatcacaatgactttatcagatcaaaattaacaaaattaaaggagcatgtatttttttctgaatatattgtgactccagatacatatggatctttatgcgtcgaattaaatgggtctagttttcagcacggtggtagatatatagaggtggaggaatttatagatgctggaagacaagttagatggtgttctacatccaatcatatatctgaagatatacccgaagatatacacactgataaatttgtcatttatgatatatacacttttgacgctttcaagaataaacgattggtattcgtacaggtacctccgtcgttaggagatgatagctatttgactaatccgttattgtctccgtattatcgtaattcagtagccagacaaatggtcaatgatatgatttttaatcaagattcatttttaaaatatttattagaacatctgattagaagccactatagagtttctaaacatataacaatagttagatacaaggataccgaagaattaaatctaacgagaatatgttataatagagataagtttaaggcgtttgtattcgcttggtttaacggcgtttcggaaaatgaaaaggtactagatacgtataaaaaggtatctaatttgatataatgaattcagtgactgtatcacacgcgccatatactattacttatcacgatgattgggaaccagtaatgagtcaattggtagagttttataacgaagtagccagttggctgctacgagacgagacgtcgcctattcctgataagttctttatacagttgaaacaaccgcttagaaataaacgagtatgtgtgtgcggtatagatccgtatccgaaagatggaactggtgtaccgttcgaatcaccaaattttacaaaaaaatcaattaaggagatagcttcatctatatctagattaaccggagtaattgattataaaggttataaccttaatataatagacggggttataccctggaattattacttaagttgtaaattaggagaaacaaaaagtcacgcgatctactgggataagatttccaagttactgctgcagcatataactaaacacgttagtgttctttattgtttgggtaaaacagatttctcgaatatacgggcaaagttagaatccccggtaactaccatagtgggatatcatccagcggctagagaccgtcaattcgagaaagatcgatcatttgaaattatcaacgttttactggaattagacaacaaggtacctataaattgggctcaagggtttatttattaatgctttagtgaaattttaacttgtgttctaaatggatgcggctattagaggtaatgatgttatctttgttcttaagactataggtgtcccgtcagcgtgcagacaaaatgaagatccaagatttgtagaagcatttaaatgcgacgagttagaaagatatattgagaataatccagaatgtacactattcgaaagtcttagggatgaggaagcatactctatagtcagaattttcatggatgtagatttagacgcgtgtctagacgaaatagattatttaacggctattcaagattttattatcgaggtgtcaaactgtgtagctagattcgcgtttacagaatgcggcgccattcatgaaaatgtaataaaatccatgagatctaatttttcattgactaagtctacaaatagagataaaacaagttttcatattatctttttagacacgtataccactatggatacattgatagctatgaaacgaacactattagaattaagtagatcatctgaaaatccactaacaagatcgatagacactgccgtatataggagaaaaacaactcttcgggttgtaggtactaggaaaaatccaaattgcgacactattcatgtaatgcaaccacctcatgataatatagaagattacctattcacttacgtggatatgaacaacaatagttattacttttctctacaacgacgattggaggatttagttcctgataagttatgggaaccagggtttatttcattcgaagacgctataaaaagagtttcaaaaatattcattaattctataataaactttaatgatctcgatgaaaataattttacaacggtaccactggtcatagattacgtaacaccttgtgcattatgtaaaaaacgatcgcataaacatccgcatcaactatcgttggaaaatggtgctattagaatttacaaaactggtaatccacatagttgtaaagttaaaattgttccgttggatggtaataaactgtttaatattgcacaaagaattttagacactaactctgttttattaaccgaacgaggagaccatatagtttggattaataattcatggaaatttaacagcgaagaacccttgataacaaaactaattttgtcaataagacatcaactacctaaggaatattcaagcgaattactctgtccaagaaaacgaaagactgtagaagctaacatacgagacatgttagtagattcagtggagaccgatacctatccggataaacttccgtttaaaaatggtgtattggacctggtagacggaatgttttactctggagatgatgctaaaaaatatatgtgtactgtatcaaccggatttaaatttgacgatacaaagttcgtcgaagacagtccagaaatggaagagttaatgaatatcattaacgatatccaaccattaacggatgaaaataagaaaaatagagagctatatgaaaaaacattatctagttgtttatgcggtgctaccaaaggatgtttaacattcttttttggagaaactgcaactggaaagtcgacaaccaaacgtttgttaaagtctgctatcggtgacctgtttgttgagacgggtcaaacaattttaacagatgtattggataaaggacctaatccatttatcgctaacatgcatttgaaaagatctgtattctgtagcgaactacctgattttgcatgtagtgggtcaaagaaaatcagatctgataatattaaaaagttgacagaaccttgtgtcattggaagaccgtgtttctccaataaaattaataatagaaaccatgcgacaatcattatcgatactaattacaaacctgtttttgataggatagataacgcattaatgagaagaattgccgtcgtgcgattcagaacacacttttctcaaccttctggtagagaggctgctgaaaataatgacgcgtacgataaagtcaaactattagacgaggggttagatggtaaaatacaaaataatagatatagattcgcatttctatacttgttggtgaaatggtacagaaaatatcatgttcctattatgaaactatatcctacacccgaagagattcctgactttgcattctatctcaaaataggtactctgttggtatctagctctgtaaagcatattccattaatgacggacctctccaaaaagggatatatattgtacgataatgtggtcactcttccgttgactactttccaacagaaaatatccaagtattttaattctagactatttggacacgatatagagagcttcatcaatagacataagaaatttgccaatgttagtgatgaatatctgcaatatatattcatagaggatatttcatctccgtaaatatatgctcatatatttatagaagatatcacatatctaaatgaataccggaattatagatttatttgataatcatgttgatagtataccaactatattacctcatcagttagctactctagattatctagttagaactatcatagatgagaacagaagcgtgttattgttccatattatgggatcaggtaaaacaataatcgctttgttgttcgccttggtagcttccagatttaaaaaggtttacattctagtgccgaacatcaacatcttaaaaattttcaattataatatgggtgtagctatgaacttgtttaatgacgaattcatagctgagaatatctttattcattccacaacaagtttttattctcttaattataacgataacgtcattaattataacggattatctcgctacaataactctatttttatcgttgatgaggcacataatatctttgggaataatactggagaacttatgaccgtgataaaaaataaaaacaagattccttttctactattgtctggatctcccattactaacacacctaatactctgggtcatattatagatttaatgtccgaagagacgatagattttggtgaaattattagtcgtggtaagaaagtaattcagacacttcttaacgaacgcggtgtgaatgtacttaaggatttgcttaaaggaagaatatcatattacgaaatgcctgataaagatctaccaacgataagatatcacggacgtaagtttctagatactagagtagtatattgtcacatgtctaaacttcaagagagagattatatgattactagacgacagctatgttatcatgaaatgtttgataaaaatatgtataacgtgtcaatggcagtattgggacaacttaatctgatgaataatttagatactttatttcaggaacaggataaggaattgtacccaaatctgaaaataaataatggcgtgttatacggagaagaattggtaacgttaaacattagttccaaatttaaatactttattaatcggatacagacactcaacggaaaacattttatatacttttctaattctacatatggcggattggtaattaaatatatcatgctcagtaatggatattctgaatataatggttctcagggaactaatccacatatgataaacggcaaaccaaaaacatttgctatcgttactagtaaaatgaaatcgtctttagaggatctattagatgtgtataattctcctgaaaacgatgatggtagtcaattgatgtttttgttttcatcaaacattatgtccgaatcctatactctaaaagaggtaaggcatatttggtttatgactatcccagatactttttctcaatacaaccaaattcttggacgatctattagaaaattctcttacgccgatatttctgaaccagttaatgtatatcttttagccgccgtatattccgatttcaatgacgaagtgacgtcattaaacgattacacacaggatgaattaattaatgttttaccatttgacatcaaaaagctgttatatctaaaatttaagacgaaagaaacgaatagaatatactctattcttcaagagatgtctgaaacgtattctcttccaccacatccatcaattgtaaaagttttattgggagaattggtcagacaatttttttataataattctcgtattaagtataacgataccaagttacttaaaatggttacatcagttataaaaaataaagaagacgctaggaattacatagatgatattgtaaacggtcacttctttgtatcgaataaagtatttgataaatctcttttatacaaatacgaaaacgatattattacagtaccgtttagactttcctacgaaccatttgtttggggagttaactttcgtaaagaatataacgtggtatcttctccataaaactgatgagatatataaagaaataaatgtcgagctttgttaccaatggataccttccagttacattggagccacacgagctgacgttagacataaaaactaatattaggaatgccgtatataagacgtatctccatagagaaattagtggtaaaatggccaagaaaatagaaattcgtgaagacgtggaattacctctcggcgaaatagttaataattctgtagttataaacgttccgtgtgtaataacctacgcgtattatcacgttggggatatagttagaggaacattaaacatcgaagatgaatcaaatgtaactattcaatgtggagatttaatctgtaaactaagtagagattcgggtactgtatcatttagcgattcaaagtactgcttttttcgaaatggtaatgcgtatgacaatggcagcgaagtcactgccgttctaatggaggctcaacaaggtatcgaatctagttttgtttttctcgcgaatatcgtcgactcataagaaagagaatagcggtaagtataaacacgaatactatggcaataattgcgaatgttttattcccttcgatatatttttgataatatgaaaaacatgtctctctcaaatcggacaaccatctcataaaatagttatctcgcgctggcgaggtggttgccgctcgtataatctccccagaataatatacttgcgtgtcgtcgttcaatttatacggatttctatagttctctgttatataatgcggttttccatcatgattagacgacgacaatagtgttctaaatttagatagttgatcagaatgaatgtttattggcgttggaaaaattatccatgctgcgtctgcagagtggttgatagttgttcctagatatgtaaaataatccaacgtactaggtagcaaattgtctagataaaatactgaatcaaacggcgcagacgtattagcggatctaatggaatccaattgattgactatcttttgaaaatatacatttttatgatccgatacttgtaagaatatagaaataatgataagtccatcatcgtgtttttttgcctcttcataagaactatattttttcttattccaatgaacaagattaatctctccagagtatttgtacacatctatcaagtgattggatccataatcgtcttcctttccccaatatatatgtagtgatgataacacatattcattggggagaaaccctccacttatatatcctcctttaaaattaatccttactagttttccagtgttctggatagtggttggtttcgactcattataatgtatgtctaacggcttcaatcgcgcgttagaaattgcttttttagtttctatattaataggagatagttgttgcggcatagtaaaaatgaaatgataactgtttaaaaatagctcttagtatgggaattacaatggatgaggaagtgatatttgaaactcctagagaattaatatctattaaacgaataaaagatattccaagatcaaaagacacgcatgtgtttgctgcgtgtataacaagtgacggatatccgttaataggagctagaagaacttcattcgcgttccaggcgatattatctcaacaaaattcagattctatctttagagtatccactaaactattacggtttatgtactacaatgaactaagagaaatctttagacggttgagaaaaggttctatcaacaatatcgatcctcactttgaagagttaatattattgggtggtaaactagataaaaaggaatctattaaagattgtttaagaagagaattaaaagaggaaagtgatgaacgtataacagtaaaagaatttggaaatgtaattctaaaacttacaacacgggataaattatttaataaagtatatataggttattgcatggcgtgttttattaatcaatcgttggaggatttatcgcatactagtatttacaatgtagaaattagaaagattaaatcattaaatgattgtattaacgacgataaatacgaatatctgtcttatatttataatatgctagttaatagtaaatgaacttttacagatctagtataattagtcagattattaagtataatagacgactagctaagtctattatttgcaaggatgactctcaaattattacactcacggcattcgttaaccaatgcctatggtgtcataaacgagtatccgtgtccgctattttattaactactgataacaaaatattagtatgtaacagacgagatagttttctctattctgaaataattagaactagaaacatgtttagaaagaaacgattatttctgaattattccaattatttgtccaaacaggaaagaagtatactatcgtcatttttttctctatatccagctactgctgataatgatagaatagacgctatttatccgggtggcatacccaaaaggggtgagaatgttccagagtgtctatccagggaaatcaaagaagaagttaatatagacaattcttttgtattcatagacactcggttttttattcatggtatcatagaagataccattatcaacaaattttttgaggtaattttctttgtcggaagaatatctctaacgagtgatcaaattattgatacctttaaaagtaatcatgaaatcaaggatctaatatttttagatccgaattcaggtaatggactccaatacgaaattgcaaaatatgctctagatactgcaaaacttaaatgttacggccatagaggatgttattatgaatcattaaaaaaattaactgaggatgattgattagaaaatataaattaatttaccatcgtgtatttttataacgggattgtccggcatatcatgtagatagttaccgtctacatcgtatactcgaccatctacgcctttaaatcctctatttattgacattaatctattagaattggaataccaaatattagtaccctcaattagtttattggtaatattttttttagacgatagatcgatggctcttgaaaccaaggttttccaaccggactcattgtcgatcggtgagaagtctttttcattagcatgaatccattctaatgatgtatgtttaaacactctaaacaattggacaaattcttttgatttgctttgaatgatttcaaataggtcttcgtctacagtaggcataccattagataatctagccattataaagtgcacgtttacatatctacgttctggaggagtaagaacgtgactattgagacgaatggctcttcctactatctgacgaagagacgcctcgttccatgtcatatctaaaatgaagatatcattaattgagaaaaaactaataccctcgcctccactagaagagaatacgcatgttttaatgcattctccgttagtgtttgattcttggttaaactcagccaccgccttgattctagtatcttttgttctagatgagaactctatattagagataccaaagactttgaaatatagtaataagatttctattcctgactgattaacaaatggttcaaagactagacatttaccatgggatgctaatattcccaaacatacatctataaatttgacgcttttctcttttaattcagtaaatagagagatatcagccgcactagcatcccctttcaatagttctccctttttaaaggtatttaatgcggatttagaaaactctctatctcttaatgaatttttaaaatcattatatagtgttgctatctcttgcgcgtattcgccgggatcacgattttgtctttcaggaaagctatcgaacgtaaacgtagtagccatacgtctcagaattctaaatgatgatataccagtttttatttctgcgagtttagccttttgataaatctcttcttgcttttttgacatattaacgtatcgcattaatactgttttcttagcgaatgatgcagacccttctacgttatcaaaaatagaaaactcgttattaactatgtacgaacataggcctcctagtttggagactaattctttttcatcgactagacgtttattctcaaatagtgattggtgttgtaaggatcctggtcgtagtaagttaaccaacatggtgaattcttgcacactattgacgataggtgtagccgataaacaaatcatcttatggttttttaatgcgatggtcttggataaaaaattatatactgaacgagtaggacggatcttaccatcttctttgattaatgatttagaaatgaagttatgacattcatcaataatgacgcatattctactcttggaattaatagttttgatattagtaaaaaatttatttctaaaattttgatcatcgtaattaataaaaatacaatccttcgttatctctggagcgtatctgagtatagtgttcatccaaggatcttctatcaaagcctttttcaccaataagataatagcccaattcgtataaatatccttaagatgtttgagaatatatacagtagtcattgttttaccgacacccgtttcatggaacaataaaagagaatgcatactgtctaatcctaagaaaactcttgctacaaaatgttgataatccttgaggcgtactacgtccgaccccatcatttcaacgggcatattagtagttctgcgtaaggcataatcgatataggccgcgtgtgatttactcatttatgagtgataagtaataactatgttttaaaaatcacagcagtagtttaactagtcttctctgatgtttgttttcgatactttttgaatcagaagtcatactagaataaagcaacgagtgaacgtaatagagagcttcgtatactctattcgaaaactctaagaacttattaatgaattccgtatccactggattgtttaaaatactaaattgaacactgttcacatccttccaagaagaagacttagtgacggacttaacatgagacataaataaatccaaattttttttacaaacatcactagccaccataatggcgctatctttcaaccagctatcgcttacgcattttagcagtctaacatttttaaagagactacaatatattctcatagtatcgattacacctctaccgaataaagttggaagtttaataatacaatatttttcgtttacaaaatcaaataatggtcgaaacacgtcgaaggttaacatcttataatcgctaatgtatagattgttttcagtgagatgattattagatttaatagcatctcgttcacgtttgaacagtttattgcgtgcgctgaggtcggcaactacggcgtccgctttagtactcctcccataatactttacgctattaatctttaaaatttcatagactttatctagatcgctttctggtaacatgatatcatgtgtaaaaagttttaacatgtcggtcggcattctatttagatcattaactctagaaatctgaagaaagtaattagctccgtattccagactaggtaatgggcttttacctagagacagattaagttctggcaatgtttcataaaatggaagaaggacatgcgttccctcccggatattttttacaatttcatccatttacaactctatagtttgttttcattattattagttattatctcccataatcttggtaatacttaccccttgatcgtaagataccttatacaggtcattacatacaactaccaattgtttttgtacataatagattggatggttgacatccatggtggaataaactactcgaacagatagtttatctttccccctagatacattggccgtaatagttgtcggcctaaagaatatctttggtgtaaagttaaaagttagggttcttgttccattattgctttttgtcagtagttcattataaattctcgagatgggtccgttctctgaatatagaacatcatttccaaatctaacttctagtctagaaataatatcggtcttattcttaaaatctattcccttgatgaagggatcgttaatgaacaaatccttggcctttgattcggctgatctattatctccgttatagacgttacgttgactagtccaaagacttacaggaatagatgtatcgatgatgttgatactatgtgatatgtgagcaaagattgttctcttagtggcatcactatatgttccagtaatggcggaaaactttttagaaatgttatatataaaagaattttttcgtgttccaaacattagcagattagtatgaagataaacactcatattatcaggaacattatcaatttttacatacacatcagcatcttgaatagaaacgataccatcttctggaacctcaacaatctcggcagactccggataaccagtcggtggaccatcgctaacaataactagatcatccaacaatctactcacatatgcatctatataatctttttcatcttgtgagtaccctggatacgaaataaatttattatccgtatttccataataaggtttagtataaacagagagcgatgttgccgcatgaacttcagttacagtcgccgttggttggtttatttgacctattactctcctaggtttctctataaacgatggtttaatttgtacattcttaaccatatatccaataaagctcaattcaggaacataaacaaattctttgttgaacgtttcaaagtcgaacgaagagtcacgaataacgatatcggatactggattgaaggttaccgttacggtaatttttgaatcggatagtttaagactgctgaatgtatcttccacatcaaacggagttttaatataaacgtatactgtagatggttctttaatagtgtcattaggagttaggccaatagaaatatcattaagttcactagaatatccagagtgtttcaaagcaattgtattattgatacaattattatataattcttcgccctcaatttcccaaataacaccgttacacgaagagatagatacgtgattaatacatttatatccaacatatggtacgtaaccgaatcttcccatacctttaacttctggaagttccaaactcagaaccaaatgattaagcgcagtaatatactgatccctaatttcgaagctagcgatagcctgattgtctggaccatcgtttgtcataactccggatagagaaatatattgcggcatatataaagttggaatttgactatcgactgcgaagacattagaccgtttaatagagtcatccccaccgatcaaagaattaatgatagtattattcattttctatttaaaatggaaaaagcttacaataaactccgtagagaaatatctataatttgtgagttttccttaaagtaacagcttccgtaaacgccgtctttatctcttagtaagtttattgtatttataaccttttccttatcttcatagaatactaaaggcaacaaagaaatttttggttcttctctaagagctacgtgagacttaaccatagaagccaacgaatccctacatattttagaacagaaataccctacttcaccacccttgtatgtctcaatactaataggtctaaaaaccaaatcttgattacaaaaccaacacttatcaattacactatttgtcttaatagacacatctgccatagatttataatactttggtagtatacaagcgagtgcttcttctttagcgggcttaaagactgctttaggtgctgaaataaccacatctggaaggcttactcgcttagccatttaattacggaactatttttttatacttctaatgagcaagtagaaaacctctcatctacaaaaacatactcgtgtccataatcctctaccatagttacacgttttttagatctcatatgtgctaaaaagttttcccatactaattggttactattatttttcgtataatttttaacagtttgaggttttagatttttagttacagaagtgatatcgaatattttatccaaaaagaatgaataattaattgtcttagaaggagtgttttcttggcaaaagaataccaagtgcttaaatatttctactacttcattaatcttttctgtactcagattcagtttctcatcttttacttgattgattatttcaaagactaacttataatcctttttatttattctctcgttagccttaagaaaactagatacaaaatttgcatctacatcatccgtggatatttgatttttttccatgatatccaagagttccgagataatttctccagaacattgatgagacaataatctccgcaatacatttctcaaatgaataagtttattagacacgtggaagtttgactttttttgtacctttgtacatttttgaaataccgactcgcaaaaaatacaatattcatatccttgttcagatactataccgttgtgtctacaaccgctacataatcgtagattcatgttaacactctacgtatctcgtcgtccaatattttatataaaaacattttatttctagacgttgccagaaaatcctgtaatacttttagttttttgggctgtgaataaagtatcgccctaatatggttaccgtcctccgccaatatagtagttaaattatccgcacatgcaaaagaacaccgcttaggcggattcagtacaatgttatatttttcgtaccaactcatttaaatatcataatctaaaatagttctgtaatatgtctagcgctaatatattgatcataatcctgtgcataaattaagatacaacaatgtctcgaaatcatcgacatggcttcttccatagttagaagatcgtcgtcaaagttagcaacgtgattcatcaacatttgctgttttgaggcagcaaatactgaaccgtcgccattcaaccattcataaaaaccatcgtctgaatccattgataatttcttgtactggtttttgagagctcgcatcaatctagcatttctagctcccggattgaaaacagaaagaggatcgtacatccagggtccattttctgtaaatagaatcgtataatgtcccttcaagaagatatcagacgatccacaatcaaagaattggtctccgagtttgtaacaaactgcggactttaacctatacatgataccgtttagcataatttctggtgatacgtcaatcggagtatcatctattagagatctaaagccggtgtaacattctccaccaaacatattcttattctgacgtcgttctacataaaacatcattgctccattaacgataacaggggaatgaacagcactacccatcacattagttcccaatggatcaatgtgtgtaactccagaacatcttccatagcctatgttaggaggagcgaacaccactcttccactattgccatcgaatgccatagaataaatatccttggaattgatagaaatcggactgtcggatgttgtgatcatcttcataggattaacaacgatgtatggtgccgcctgaagtttcatatcgtaactgatgccgttcataggtctagccacagaaaccaacgtaggtctaaatccaactatagacaaaatagaagccaatatctgttcctcatctgtcataacttgagagcatccagtatgaataatcttcattagatggggatctaccgcatcatcatcgttacaataaaaaattcccattctaatgttcataattgcttttctaatcatggtatgcatgtttgctctctgaatctctgtggaaattagatctgatacacctgtaatcactatcggattatcctccgtaagacgattaaccaacaacatataattataagactttacttttctaaattcataaagttgctggattaggctataggtgtctccatgtacatacgcgttctcgagcgcaggaagtttaataccgaatagtgccatcagaataggatgaatatagtaattagtttctggttttctataaataaaagacaaatcttgtgaactagacatatcggtaaaatgcatggattggaatcgtgtagtcgacagaagaatatgatgattagatggagagtatattttatctaactctttgagttggtcaccgattctaggactagctcgagaatgaataagtactaaaggatgagtacatttcacagaaacactagcattgttcaatgtgctctttacatgggtaaggagttgaaatagctcgtttctatttgttctgacaatatttagtttattcataatgttaagcatatcctgaatagtaaagttagatgtgtcatacttgttagtagttagatatttagcaattgcattcccatcatttctcaatctcgtactccaatcatgcgtggatgctacttcgtcgatggaaaccatacaatcctttttgataggctgttgagattgattatttcctgcacgtttaggtttggtacgttgatttctagcccctgcggatataaagtcatcgtctacaatttgggacaatgaattgcatacactacaagacaaagatttatcagaagtgtgaatatgatcttcatctaccaaagaaagagtttgattagtataactagattttagtcctgcgttagatgttaaaaaaacatcgctattgaccacggcttccattatttatattcgtagtttttactcgaaagcgtgattttaatatccaatcttattacttttggaatcgttcaaaacctttgactagttgtagaatttgatctattgccctacgcgtatactcccttgcatcatatacgttcgtcaccagatcgtttgtttcggcctgaagttggtgcatatctttttcaacactcgacatgagatccttaagggccatatcgtctagattttgttgagatgctgctcctggatttggattttgttgtgctgttgtacatactgtaccaccagtaggtgtaggagtacatacagtggccacaataggaggttgaggaggtgtaaccgttggagtagtacaagaaatatttccatccgattgttgtgtacatgtagttgttggtaacgtctgagaaggttgggtagatggcggtgtcgtcgtcttttgatctttattaaatttagagataatatcctgaacagcattgctcggcgtcaacgctggaaggagtgaactcgccggcgcatcagtatctgcagacagccaatcaaaaagattagacatatcagatgatgtattagtttgttgtcgtggttttggtgtaggagcagtactactaggtagaagaataggagccgatgtaggtgtcggaaccggctgtggagttatatgaatagttggttgtagcggttggataggctgtctgctggcggccatcatattatctctagctagttgttctcgcaactgtctttgataatacgactcttgagactttagtcctatttcaatcgcttcatcctttttcgtatccggatccttttcttcagaataatagattgacgactttggtgtagaggattctgccagcccctgtgagaacttgttaaagaagtccatttaaggctttaaaattgaattgcgattataagattaaatggcagacacagacgatattatcgactatgaatccgatgatctcactgaatacgaggatgatgaagaagaggaagaagatggagagtcactagaaactagtgatatagatcccaaatcttcttataagattgtagaatcagcatccactcatatagaagatgcgcattccaatcttaaacatatagggaatcatatatctgctcttaaacgacgctatactagacgtataagtctatttgaaatagcgggtataatagcagaaagctataacttgcttcaacgaggaagattacctctagtttcagaattttctgacgaaacgatgaagcaaaatatgctacatgtaattatacaagagatagaggagggttcttgtcctatagtcatcgaaaagaacggagaattgttgtcggtaaacgattttgacaaagatggtctaaaattccatctagactatattatcaaaatttggaaacttcaaaaacgatattagaatttatacgaatatcgttctctaaatgtcacaatcaagtctcgcatgttcagcaatttattgtcgtactttatatcgtgttcattaacgatatcttgcaaaatagtaatgattctatcttccttcgatagatattcttcagagattattgtcttatattctttcttgttatcagatatgaatttgataagactttgaacattattgatacccgtctgtttaattttttctacagatattttagttttggcagattctatcgtatctgtcaatagacatccaacatcgacattcgacgtcaattgtctataaatcaacgtataaattttagaaataacattagcgaattgttgtgcattgatgtcgttattctgaaacagtatgattttaggtagcattttcttaacaaagagaacgtatttattgttactcagttgaacagatgatatatccagattactaacgcatctgattccgtataccaaactttcagaagaaatggtatacaattgtttgtattcattcaatgtctctttttcagaaattagtttagagtcgaatactgcaataattttcaagagatagttttcatcagataagattttatttagtgtagatatgataaaactattgttttgttggagaacttgatacgccgcgttctctgtagtcgacgctctcaaatgggaaacgatctccattatttttttggaatcggatactatatcttcggtatcttgacgcagtctagtatacatagagttaagagagattagagtttgtacattaagcaacatgtctctaaatgtggctacaaacttttccttttccacatcatctagtttattatataccgatttcacaacggcaccagatttaaggaaccagaatgaaaaactctgataactacaatatttcatcatagttacgattttatcatcttctatagttggtgtaatagcgcatacctttttctccaagactggaaccaacgtcataaaaatgtttaaatcaaaatccatatcaacatctgatgcgctaagaccagtctcgcgttcaagattatctttactaatggtgacgaactcatcgtatagaactctaagtttgtccattatttatttacagatttagttgtttaatttatttgtgctcttccagagttgggatagtatttttctaacgtcggtattatattattaggatctacgttcatatgtatcataatattaatcatccacgttttgataaatctatctttagcttctgaaataacgtatttaaacaaaggagaaaaatatttagctacggcatcagacgcaataacattttttgtaaatgtaacgtatttagacgacagatcttcgttaaaaagttttccatctatgtagaatccatcagttgttaacaccattcccgcgtcagattgaataggagtttgaatagtttgttttggaaatagatccttcaataacttatagttgggtgggaaaaaatcgattttatcactagactctttcttttttactatcattacctcatgaactatttcttgaatgagtatatgtattttctttcctatatcggacgcgttcattggaaaatataccatgtcgttaactataagaatatttttatcctcgtttacaaactgaataatatcagatgtagttcgtaaacgaactatatcatcaccagcacaacatctaactatatgatatccactagtttcctttagtcgtttattatcttgttccatattagcagtcattccatcatttaagaaggcgtcaaagataatagggagaaatgacattttggattctgttacaactttaccaaaattaaggatatacggacttactatctttttctcaacgtcaatttgatgaacacacgatgaaaatgtacttcgatgagattgatcatgtagaaaacaacaagggatacaatatttccgcatatcatgaaatatattaagaaatcccaccttattatatttccccaaaggatccatgcacgtaaacattatgccgttatcattaataaagacttctttctcatcggatctgtaaaagttgttactgatttttttcattccaggatctagataattaataatgatgggttttctattcttattctttgtattttggcatatcctagaccagtaaacagtttccactttggtaaaatcagcagacttttgaacgctattaaacatggcattaatggcaataactaaaaatgtaaaatatttttctatgttaggaatatggtttttcactttaatagatatatggtttttggccaaaatgatagatatttttttatccgaggatagtaaaatattattagtcgccgtctctataaaaatgaagctagtctcgatatccaattttattctagaattgataggagtcgccaaatgtaccttatacgttatatctcccttgatgcgttccatttgtgtatctatatcggacacaagatctgtaaatagttttacgttattaatcatcacggtatcgccgtcgctagataatgctaatgtaccatccaagtcccaaatggagagatttaactgttcatcgtttagaataaaatgattaccggtcatattaataaagtgttcatcgtatctagataacaacgacttataattaatgtccaagtcttgaactcgctgaatgatcttttttaacccagttagttttagattggtacgaaatatattgttaaactttgattctacagtaatgtccaaatctagttgtggaaatacttccatcaacattgtttcaaacttgataatattattatctacatcttcatacgatccaaattccggaatagatgtatcacatgctcttgccacccagataaccaaaaagtcacacgctccaggatatacattgtataaaaagctatcgtttttaagtagggtttttttctgcgtgtatacgaagggattaaaaatagtattatcaacgtaactatattccaaattattcttatgagaatagataataatatcgtccttaatatctaacaaatttcctaaatatccctttaattgagtcattcgaagcgtcaatagaatatgtctcttaactatttccggctgttgtatatttaaatgacttcgtaaaaaataatatatgggcgacttctcatctatgtaatcatatggagtgagatatagggctcgttctacctcctgccccttacccacctgtaataccaattgcggacttactatatatcgcatatttatatcgtggggtaaagtgaaaatctactaccgatgatgtaagtcttacaatgttcgaaccagtaccagatcttaatttggaggcctccgtagaactaggggaggtaaatatagatcaaacaacacctatgataaaggaaaatagcggttttatatcccgtagtagacgtctattcgcccatagatctaaggatgatgagagaaaactagcactacgattctttttacaaagactttattttttagatcatagagagattcattatttgttcagatgcgttgacgctgtaaaagacgtcactattaccaaaaaaaataacattatcgtggcgccttatatagcacttttaactatcgcatcaaaaggatgcaaacttacagaaacaatgattgaagcattctttccagaactatataatgaacatagtaagaaatttaaattcaactctcaagtatccatcatccaagaaaaactcggataccagtttggaaactatcacgtttatgattttgaaccgtattactctacagtagctctggctattcgagatgaacattcatctggcatttttaatatccgtcaagagagttatctggtaagttcattatctgaaataacatatagattttatctaattaatctaaaatctgatcttgttcaatggagtgctagtacgggcgctgtaattaatcaaatggtaaatactgtattgattacagtgtatgaaaagttacaactggtcatagaaaatgattcacaatttacatgttcattggctgtggaatcagaacttccaataaaattacttaaagatagaaatgaattatttacaaaattcatcaacgagttaaaaaagaccagttcattcaagataagcaaacgcgataaggatacgctactaaaatattttacttaggactggagttagaatttatagacgactcatttcgtttatcattattactaccatcattattagtattcttcttgttatcttgttcagaaatatacagcaatgctatgcctaatactaaatacattatcatgcttgcaatggctctaacaacgacgaaccaaaatgaatttggtcgtagcttttgttcacaaaaatacataaagaaatgtctacataaatctatggcgccattggctacttgaaatagcgccagtcctcctacagattttaatatagctgtataacatgacatttattcatcatcaaaagagacagagtcaccatctgtcatatttagattttttttcatgtgttcaaagtatcctctactcatttcattataatagtttatcatacttagaattttaggacggatcaatgagtaagacttgactagatcgtcagtagtaatttgtgcatcgtctattctgcatccgcttcgtcgaataatgtatagcatcgctttgagattctccatagctatcaagtctttatacaatgacatggaaatatctgtgaatactttatacttctccaacatcgatgccttaacatcatcgcctactttagcattgaaaatacgttctattgtgtagatggatgtagcaagatttttaaacaacaatgccatcttacacgatgattgcctcaagtctccaatcgtttgtttagaacgattagctacagagttcaacgcttggctgactagcatattattatctttagaaattgtattcttcaatgaagcgtttatcatatctgtgatttcgttagtcatattacagtctgactgggttgtaatgttatccaacatatcacctatggatacggtacacgtaccagcatttgtaataatcctatctaagatgttgtatggcattgcgcagaaaatatcttctcctgtaatatctccactctcgataaatctactcagattattcttaaatgccttattctctggagaaaagatatcagtgtccatcatttcattaatagtatacgcagaaaagataccacgagtatcaattctatccaagatacttatcggttccgagtcacagataatggtttcctctccttcgggagatcctgcatagaaatatctaggacaatagtttctatactgtctgtaactctgataatctctaaagtcactaactgataccatgaaattgagaagatcaaacgctgaagtaatcaatttttctgcctcgtttttactacaactagttttcatcaatgtagtgacgatgtattgtttagttactcttggtctaatactgatgatagagatattattacttcccataatggatcttctagtagtcaccttaaagcccattgatgcaaatagcagatagataaagtcttggtatgactcctttctaatatagtacggactacctttgtcacccaactttatacccacataagccataacaacctctttaatagccgtttcatgaggtttatcagccatgagcctgagtagttggaagaatctcatgaatcccgtctcagaaagtcctatatgcatgatagatttatctttcctgggaaactctcgtatagtcatagatgaaatactcttcaaagtttctgaaataagattagtaacagtcttacctccgactactctgggtaacaaacatactctaataggtgttttctctgcggagataatatcagaaaggatagagcaataagtagtattattgtgattataaagaccgaatacataacaggtagaatttataaacatcatgtcctgaaggtttttagacttgtattcctcgtaatccataccgtcccaaaacatggatttggtaactttgatagccgtagatctttgttccttcgccaacaggttaaagaaattaataaagaatttgttgtttctatttatgtccacaaattgcacgtttggaagcgtaactgttacgttcactgcagcattttgaggatcgcgagtatgaagtacgatgttattgtttactggtatatctggaaagaaatctaccagtctaggaataagagattgatatcgcatagaaatagtaaagtttataatctcatcatcgaagagcattttgttaccattgtaataaatatccactctgtcatatgtataaatgaagtactgttcaaacatgatgagatgtttatatgttggcatagtagtgagatcgacgtttggtaatggcaatgtattaagattaactccataatgtctagcagcatctgcgatgttataagtgtcgtcaaagcggggtcgatcttgtgctgttatatattgtctaacacctataagattatcaaaatcttgtctgcttaatacaccgttaacaatttttgccttgaattcttttattggtgcattaataacatccttatagaggatgttaaacaaataagtgttatcaaagttaagatctggatatttcttttctgctagaacatccattgagtcggagccatctggtttaatataaccaccgataaatctagctctgtattctgtatccgtcaatctaatattaagaaggtgttgagtgaaaggtggaagatcgtaaaagctgtgagtattaatgataggattagtttccgaactaatgttaattggggtattaataatatctatatttccagcgttaagtgtaacattaaacagttttaattcacgtgacgtggtatcaattaaataattaatgcccaatttggatatagcagcctgaagctcatcttgtttagttacggatcctaatgagttattaagcaatatatcgaacggatgaacgaaggttgttttaagttggtcacatactttgtaatctagacatagatgcggaagaacggtagaaactatacgaaataaatattcagagtcctctaattgatcaagagtaactattgacttaataggcatcatttatttagtattaaatgacgaccgtaccagtgacggatatacaaaacgatttaattacagagttttcagaagataattatccatctaacaaaaattatgaaataactcttcgtcaaatgtctattctaactcacgttaacaacgtggtagatagagaacataatgccgccgtagtgtcatctccagaggaaatatcctcacaacttaatgaagatctatttccagatgatgattcaccggccactattatcgaacgagtacaacctcatactactattattgacgatactccacctcctacttttcgtagagagttattaatatcggaacaacgtcaacaacgagaaaaaagatttaatattacagtatcgaaaaatgctgaagcaataatggaatctagatctatgataacttctatgccaacacaaacaccatccttgggagtagtttatgataaagataaaagaattcagatgttagaggatgaagtggttaatcttagaaatcaacgatctaatacaaaatcatctgataatttagataattttaccaaaatactatttggtaagactccgtataaatcaacagaagttaataagcgtatagccatcgttaattatgcaaatttgaacgggtcccccttatcagttgaggacttggatgtttgttcggaggatgaaatagatagaatctataaaacgattaaacaatatcacgaaagtagaaaacgaaaaattatcgtcactaacgtgattattattgtcataaacattatcgagcaggcattgctaaaactcggatttgaagaaatcaaaggactgagtaccgatatcacttcagaaattatcgatgtggagatcggagatgactgcgatgctgtagcatctaaactaggaatcggtaacagtccggttcttaatattgtattgtttatactcaagatattcgttaaacgaattaaaattatttaatttaatacattcccatatccagacaacaatcgtctggattaatctgttcctgtcgtctcataccggacgacatattaatctttttattagtaggcatctttttagatggtttctttttcccagcattaactgagtcgatacctagaagatcgtgattgatctctccgaccattccacgaacttctaattggccgtctctgacggtaccataaactattttaccagcattagtaacagcttggacaatctgaccatccattgcgttgaatgatgtagttgctgttgttctacgtttaggagcaccagaagtatttttggagcccttggaggctgatgtagaagaagacgaggattttgatttacatgtaatacattttgtactctttgattttgtatcacatgcgccggcagtcacatttgtttgagaattaagattattgttgcctcctttgacggctgcatctccaccgatttgcgctagtagatttttaagctgtggtgtaatcttattaactgtttcgatataatcatcgtaactgcttctaacggctaaattttttttatccgccatttagaagctaaaaatatttttatttatgcagaagatttaactagattatacaatgaactaatatgatccttttccagattatttacaaacttggtattttttggttctggaggaggcgaatttaaattcggacttggattcggattttgtgagttcttgatcttattatacatcgagtataggatggcgacggtaactgctacgcaaataccgatcaacaaaagaataccaatcatttattgacaataacttcactattgatcaagtatgcaatatatcatcttttcactaaataagtagtaataatgattcaacaatgtcgagatatatggacgataataatttagttcatggaaatatcgctatgattggtatgaatgactccgctaactctgtggggtgcgcagtgctttccccacatagaataaattagcattccgactgtgataataataccaagtataaacgccataatactcaatactttccatgtacgagtgggactggtagacttactaaagtcaataaaggcgaagatacacgaaagaatcaaaagaatgattccagcgattagcacgccggaaaaataatttccaatcataagcatcatgtccatttaactaataaaaattttaaatcgccgaatgaacaaagtggaatataaaccatataaaaacaatagtttgtactgcaaaaataatatctatttttgttttcgaagatatggtaaaattaaatagtagtacacagcatgttataactaacagcagcaacggctcgtaattacttatcatttactagacgaaaaggtggtgggatattttcttgctcaaataatacgaatatatcacccatccattttatgcgatgtttatatactctaatctttaatagatctatagacgacgggtttaccaacaatatagattttatcgattcatctaatttaaacccttccttaaacgtgaatgatctattatctggcataacgatgactctacctgatgaatcggacaatgtactgggccatgtagaataaattatcaacgaattatcgtctacgaacatttatatcatttgttttaattttaggacgcgaataaatggatataaaatagaaaataacagatattacaaccaatgttatggccgcgcccaaccaggtaggcagttttattttatcttttactacaggttctcctggatgtacgtcaccaacggcggacgtagttctagtacaattagacgtaagttctgcttgggaattttttaacgctaaagagttaacgttaatcgtgcacccaacgtatttacatctagttctttgaacatcttgattataatataaccattttctatctctagattcgtcggtgcactcatgtaaccaacataccctaggtcctaaatatttatctccggaattagattttggataattcgcgcaccaacaatttctatttcctttatgatcgttacaaaagacgtataatgccgtatccccaaaagtaaaataatcaggacgaataattctaataaactcagaacaatatctcgcatccatatgtttggagcaaatatcggaataagtagacatagccggtttccgttttgcacgtaaccattctaaacaattggggtttccaggatcgtttctacaaaatccagtcatgaaatcatcacaatgttctgtcttgtaattattattaaatatttttggacagtgtttggtatttgtcttagaacaacattttgccacgctatcactatcgcccaggagataatccttttttataaaatgacatcgttgcccggatgctatataatcagtggcgtgttttaaatccttaatatattcaggagttacctcgttctgataatagattaatgatccaggacgaaatttgaaagaactacatggttctccatgaattaatacatattgtttagcaaattcaggaactataaaactactacaatgatctatcgacataccatctatcaaacaaaacttgggtttaatttctcccggagatgtttcataatagtacgtataactttcttctgcaaacttaacagctctattatattcaggataattaaaacctaattccatatatttgtctcgtatatctgctattcctggtgctattttaattctattaagagtaacggctgcccccattcttaataatcgtcagtatttaaactgttaaatgttggtatatcaacatctaccttatttcccgcagtataaggtttgttgcaggtatactgttcaggaatggttacatttatacttcttctatagtcctgtctttcgatgttcatcacatatgcaaagaacagaataaacaaaataatgtaagaaataatattaaatatctgtgaattcgtaaatacattgattgccataataattacagcagctacaatacatacaatagacattcccacagtgttgccattacctccacgatacatttgagttactaagcaataggtaataactaagctagtaagaggcaatagaaaagatgagataaatatcatcaatatagagattagaggagggctatatagagccaagacgaacaaaatcaaaccgagtaacgttctaacatcattatttttgaagattcccaaataatcattcattcctccataatcgttttgcattatacctccatctttaggcataaacgattgctgctgttcctctgtaaataaatctttatcaagcactccagcacccgcagagaagtcgtcaagcatattgtaatatcttaaataactcatttatatattaaaaaatgtcactattaaagatggagtataatctttatgccgaactaaaaaaaatgacttgtggtcaacccctaagtctttttaacgaagacggggatttcgtagaagttgaaccgggatcatcctttaagtttctgatacctaagggattttacgcctctccttccgtaaagacgagtctagtattcgagacattaacaacgaccgataataaaatcactagtatcaatccaacaaatgcgccaaagttatatcctcttcaacgcaaagtcgtatctgaagtagtttctaatatgaggaaaatgatcgaatcaaaacgtcctctatacattactcttcacttggcgtgtggatttggtaagactattaccacgtgttatcttatggctacacacggtagaaaaaccgtcatttgcgtacccaataaaatgttaatacatcaatggaagacacaggtagaggcagtcggattggaacataagatatctatagatggagtaagtagtctattaaaggaactaaagactcaaagtccggatgtattaatagtagtcagtagacatctgacaaacgatgccttttgtaaatatatcaataagcattatgatttgttcatcttggatgaatcacatacgtataatctgatgaacaatacagcagttacaagatttttagcgtattatcctccgatgatgtgttattttttaactgctacacctagaccagctaaccgaatttattgtaacagtattattaatattgccaagttatccgatctaaaaaaaactatctatgcggtagatagtttttttgagccatattccacagacaatattagacatatggtaaaacgactagatggaccatctaataaatatcatatatatactgagaagttattatctgtagacgagcctagaaatcaacttattcttgataccctggtagaagaattcaagtcaggaactattaatcgaattttagttattactaaactacgtgaacatatggtattcttctacaaacgattattagattttttcggatcagaggttgtatttataggagacgcccaaaatagacgtactccagatatggtcaaatcaatcaaggaactaaatagatttatattcgtatccaccttattttattccggtactggtttagatattcctagtttggattcgttgttcatttgctcggcagtaatcaacaatatgcaaatagagcaattactagggagggtatgtcgagaaacagaactattagataggacggtatatgtatttcctaacacatccatcaaagaaataaagtacatgataggaaatttcatgcaacgaattattagtctgtctgtagataaactaggatttaaacaaaaaagttatcggaaacatcaagaatccgatcccacttctgtatgtacaacatcctccagagaagaacgtgtattaaatagaatatttaactcgcaaaatcgttaagaagtttaagcgacgatccgcatgctgcgcaggccagtgtattacccctcatagtattaatataatccaatgatacttttgtgatgtcggaaatcttaaccaatttagactgacaggcagaacacgtcatgcaatcatcatcgtcatcgataactgtagtcttgggcttctttttgcggctcttcattccggaacgcacattggtgctatccatttaggtagtaaaaaataagtcagaatatgccctatagcacgatcgtgcaaaacctggtatatcgtctctatctttatcacaatatagtgtatcgacatttttattattattgacctcgtttatcttggaacatggaatgggaacatttttgttatcaacggccatctttgccttaattccagatgttgtaaaattataactaaacagtctatcatcgacacaaatgaaattcttgtttagacgtttgtagtttacgtatgcggctcgttcgcgtctcattttttcagatattgcaggtactataatattaaaaataagaatgaaataacataggattaaaaataaagttatcatgacttctagcgctgatttaactaacttaaaagaattacttagtctgtacaaaagtttgaaattttcagattctgcggctatagaaaagtataattctttggtagaatggggaacatctacttactggaaaataggcgtgcaaaaggtagctaatgtcgagacgtcaatatctgattattatgatgaggtaaaaaataaaccgtttaatattgatccgggatattacattttcttaccggtatattttggaagcgtctttatttattcgaagggtaaaaatatggtagaacttggatctggaaactcttttcaaataccagatgatatgcgaagtgcgtgtaacaaagtattagacagcgataacggaatagactttctgagatttgttttgttaaacaatagatggataatggaagatgctatatcaaaatatcagtctccagttaatatatttaaactagctagtgagtacggattaaacatacccaaatatttagaaattgaaatagaggaagacacattatttgacgacgagttatactctattatagaacgctctttcgatgataaatttccaaaaatatccatatcgtatattaagttgggagaacttagacggcaagttgtagactttttcaaattctcgttcatgtatattgagtccatcaaggtagatcgtataggagataatatttttattcctagcgttataacaaaatcaggaaaaaagatattagtaaaagatgtagaccatttaatacgatccaaggttagagaacatacatttgtaaaagtaaaaaagaaaaacacattttccattttatacgactatgatggaaacggaacagaaactagaggagaagtaataaaacgaattatagacactataggacgagactattatgttaacggaaagtatttctctaaggttggtagtgcaggcttaaagcaattgactaataaattagatattaatgagtgcgcaactgtcgatgagttagttgatgagattaataaatccggaactgtaaaacgaaaaataaaaaaccaatcagcatttgatttaagcagagaatgtttgggatatccagaagcggattttataacgttagttaataacatgcggttcaaaatagaaaattgtaaggttgtaaatttcaatattgaaaatactaattgtttaaataacccgagtattgaaactatatatggaaactttaaccagttcgtctcaatctttaatatcgtcaccgatgtcaaaaaaagattattcgagtgaaataatatgcgcctttgatataggtgcaaaaaatcctgccagaactgttttagaagtcaaggataactccgttagggtattggatatatcaaaattagactggagttctgattgggaaaggcgcatagctaaagatttgtcacaatatgaatacactacagttcttctagaacgtcagcctagaaggtcgccgtacgtcaaatttatctattttattaaaggctttttatatcatacatcggctgccaaagttatttgcgtctcgcctgtcatgtctggtaattcatatagagatcgaaaaaagagatcggtcgaagcatttcttgattggatggacacattcggattgcgagactccgttccggatagacgcaaattagacgatgtagcggatagtttcaatttggctatgagatacgtattagataaatggaatactaattatacaccttataataggtgtaaatctagaaattacataaaaaaaatgtaataacgttagtaacgccattatggataatctatttacctttctacatgaaatagaagatagatatgccagaactatttttaactttcatctaataagttgcgatgaaataggagatatatatggtcttatgaaagaacgcatttcctcagaggatatgtttgataatatagtgtataataaagatatacatcatgccattaagaaactagtgtattgcgacatccaacttactaaacacattattaatcagaatacgtatccggtatttaacgattcttcacaagtgaaatgttgtcattatttcgacataaactcagataatagcaatattagctctcgtacagtagagatatttgagagggaaaagtcatctcttgtatcatatattaaaactaccaataagaagagaaaggtcaattacggcgaaataaagaaaactgttcatggaggcactaatgcaaattacttttccggtaaaaagtctgacgagtatctgagtactacagttagatccaacattaatcaaccttggatcaaaaccatctctaagaggatgagagttgatatcattaatcactctatagtaacgcgtggaaaaagctctatattacaaactatagaaattatttttactaatagaacatgtgtgaaaatattcaaggattctactatgcacattattctatccaaggacaaggatgaaaaggggtgtatacacatgattgacaaattattctatgtctattataatttatttctgttgttcgaggatatcatccaaaacgagtactttaaagaagtagctaatgttgtaaaccacgtacttacggctacggcattagatgagaaattattcctaattaagaaaatggctgaacacgatgtttatggagttagcaatttcaaaatagggatgtttaacctgacatttattaagtcgttggatcataccgttttcccctctctgttagatgaggatagcaaaataaagttttttaaggggaaaaagctcaatattgtagcattacgatctctggaggattgtataaattacgtgactaaatccgagaatatgatagaaatgatgaaggaaagatcgactattttaaatagcatagatatagaaacggaatcggtagatcgtctaaaagaattgcttctaaaatgaaaaaaaacactgattcagaaatggatcaacgactcggatataagtttttggtgcctgatcctaaagccggagttttttatagaccgttacatttccaatatgtatcgtattctaattttatattgcatcgattgcatgaaatcttgaccgtcaagcggccactcttatcgtttaagaataatacagaacgaattatgatagaaattagcaatgttaaagtgactcctccagattactcacctataatcgcgagtattaaaggtaagagttatgacgcattagccacgttcactgtaaatatctttaaagaggtaatgaccaaagagggtatatccatcactaaaataagtagttatgagggaaaagattctcatttgataaaaattccgctactaataggatacgggaataaaaatccacttgatacagccaagtatcttgttcctaatgtcataggtggagtctttatcaataaacaatctgtcgaaaaagtaggaattaatctagtagaaaagattacaacatggccaaaatttagggttgttaagccaaactcattcactttctcgttttcctccgtatcccctcctaatgtattaccgacaagatatcgccattacaagatatctctggatatatcacaattggaagcgtcgaatatatcatcgacaaagacatttataacggtcaatattgttttgctgtctcaatatttatctagagtgagtctagaattcattagacgtagcttatcatacgatatgcctccagaagttgtctatctagtaaacgcgataatagatagtgctaaacgaattactgaatctattactgactttaatattgatacatacattaatgacctggtggaagctgaacacattaaacaaaaatctcagttaacgatcaacgagttcaaatatgaaatgctgcataactttttacctcatatgaactatacacccgatcaactaaagggattttatatgatatctttactaagaaagtttctctactgtatctaccacacttctagatatccagatagagattcgatggtttgtcatcgtatactaacatacggcaaatattttgagacgttggcacatgatgaattagagaattacataggcaacatccgaaacgatatcatgaacaatcacaagaacagaggcacttacgcggtaaacattcatgtactaacaactcctggacttaatcatgcattttctagtctattgagtggaaagttcaaaaagtcagacggtagttatcgaacacatcctcactattcatggatgcagaatatttctattcctaggagtgttggattttatccggatcaagtaaagatttcaaagatgttttctgtcagaaaataccatccaagtcaatatctttacttttgttcatcagacgttccggaaagaggtcctcaggtaggtttagtatctcaattgtctgtcttgagttccattacaaatatactaacgtctgagtatttggatttggaaaagaaaatttgtgagtatatcagatcatattataaagatgatataagttactttgaaacaggatttccaatcactatagaaaatgctctagtcgcatctcttaatccaaatatgatatgtgattttgtaactgactttagacgtagaaaacggatgggattcttcggtaacttggaggtaggtattactttagttagggatcacatgaatgaaattcgcattaatattggagcgggaagattagtcagaccattcttggttgtggataacggagagctcatgatggatgtgtgtccggagttagaaagcagattagacgacatgacattctctgacattcagaaagagtttccgcatgtcatcgaaatggtagatatagaacaatttacttttagtaacgtatgtgaatcggttcaaaaatttagaatgatgtcaaaggatgaaagaaagcaatacgatttatgtgactttcctgccgaatttagagatggatatgtggcatcttcattagtgggaatcaatcacaattctggacccagagctattcttggatgtgctcaagctaaacaagctatctcttgtctgagctcggatatacgaaataaaatagacaatggaattcatttgatgtatccagagaggccaatcgtgattagtaaggctttagaaacttcaaagattgcggctaattgcttcggccaacatgttactatagcattaatgtcgtacaaaggtatcaatcaagaggatggaattatcatcaaaaaacaatttattcagagaggcggtctcgatattgttacagccaagaaacatcaagtagaaattccattggaaaactttaataacaaagaaagagataggtctaacgcctattcaaaattagaaagtaatggattagttagactgaatgctttcttggaatccggagacgctatggcacgaaatatctcatcaagaactcttgaagatgattttgctagagataatcagattagcttcgatgtttccgagaaatataccgatatgtacaaatctcgcgttgaacgagtacaagtagaacttactgacaaagttaaggtacgagtattaaccatgaaagaaagaagacccattctaggagacaaatttaccactagaacgagtcaaaagggaacagtcgcgtatgtcgcggatgaaacggaacttccatacgacgaaaatggtatcacaccagatgtcattattaattctacatccatcttctctagaaaaactatatctatgttgatagaggttattttaacagccgcatattctgctaagccgtacaacaataagggagaaaaccgacctgtctgttttcctagtagtaacgaaacatccatcgatacatatatgcaattcgctaaacaatgttatgagcattcaaatccgaaattgtctgatgaagaattatcggataaaatcttttgtgaaaagattctctatgatcctgaaacggataagccttatgcatccaaagtattttttggaccaatttattacttgcgtctgagacatttaactcaggacaaggcaaccgttagatgtagaggtaaaaagacgaagctcattagacaggcgaatgagggacgaaaacgtggaggaggtatcaagttcggagaaatggagagagactgtttaatagcgcatggtgcagccaatactattacagaagttttgaaagattcggaagaagattatcaagatgtgtatgtttgtgaaaattgtggagacatagcagcacaaatcaagggtattaatacatgtcttagatgttcaaaacttaatctctctcctctcttaacaaaaattgataccacacacgtatctaaagtatttcttactcaaatgaacgccagaggcgtaaaagtcaaattagatttcgaacgaagacctccttcgttttataaaccattagataaagttgatctcaaaccgtcttttctggtctaatattgtttagtagatacttatcaacatcatcaagattatcaagattatcaagattatcaagataagctaattcactaaacacattatcgatttcggtatcgttactcgcagaataaagttcgttatgatcctgatattcggaaatctgtggagtttcaggttttggtggatgtgtaacagctacttgagataccgaagtctgatattcagaaagctgtggatgttctggttcggcatccaccgatggtgttacaccactactaattggttcagtaacgtctgtggacgatggaggcaccacttctacaggttctggttctttatcctcagtcatcaacggagctacttcaatgcgaggaaatgtataatttggtaatggtttctcatgtggatctgaagaagaggtaagatatctactagaaagataccgatcacgttctagttctcttttgtagaacttaactttttctttctcagcatctagttgatattccaacctcttcacgttactacgttcagatttcaattcacgttcgcatgggttacctccgcagtttttacgagcgatttcacgttcagccttcatgcgtctctccctctctctatcgagtttatcagagcagtctttctgaaggcgatcgaactccataaatttctccaacgctttgattgtttccatagatttccgaagttcagcttttaggactgtgattctttttctttcgaattcacagctggatgtacaaccgtttccattaccgccatctctaagtttcttttctagatcggcaacatttcatccccatgccttttacattcctcgagtctactgtcgtcgaaatatcgttccagctccttttcgacatcaataactttagcacgttgtctctcaagctctcttttgtagttatctgattccctggcacgtttaagatcttcatgcaattgagtcagctcttaacacaatctcttgcttcttcgtcatagtacgcgcaatcactgtgagatccattgttaccacgtctacactcggcgagctcgcgtttaagagattcaatttcccgtttgtattggtccatgtttccattgctaccaccattagatttacaggctgctagttgtcgttcgagatcagaaatacgggttttcttggaattgatttcgtcgatgtacttggcatcgaaacacttattaagttctttttccaattctacgattttatttctttcgcgagtcaattccctcctgtagtaactatctgttttgtcagattcacgctctctacgtagactttcttgcaagttactaatttgttccctagcacgtccgagtttagttttatatgctgaatagagttctgattcatcctttgagcagatctctagcgatcgtttaagattcctgattctagtctttagcctatttacctcctcagaagatgttccgttaccgttgcgtttacactcgttaagctgtctatcaagatccatgattctatctctaagacgttgcatctctctttccatatcagcattgctttcattattacgtctgcagtcactcaactgtctttcaatatctgagattctatctctaagacgtcgcatctctctctgtttcggcattggtttcattattacgtctacagtcgttcaactgtctttcaagatctgatattctagattggagtctgctaatctctgtagcattttcacggcattcactcagttgtctttcaagatctgaaattttagattggagtctgctaatctctgtaagatttcctcctccgctctcgatgcagtcggtcaacttattctctagttctctaatacgcgaacgcagtgcatcaacttcttgcgtgtcttcctggttgcgtgtacattcatcgagtctagattcgagatctctaacgcgtcgtcgttcttcctcaagttctctgcgtactacagaaagcgtgtccctatcttgttgatatttagcaatttctgattctagagtactgattttgcttacgtagttactaatatttgtcttggccttatcaagatcctccttgtatttgtcgcattccttgatatccctacgaagtctggacagttcccattcgacattacgacgtttatcgatttcagctcggagatcgtcatcgcgttgttttagccacatacgactgagttcaagttctcgttgacaagatccatctacttttccattcctaatagtatccagttccttttctagttctgaacgcatttctcgttccctatcaagcgattctctcaattctcggatagtcttcttatcaatttctaataaatctgaaccatcatctgtcccattttgaatatccctgtgttctttgatctcttttgtaagtcggtcgattctttcggttttataaacagaatccctttccaaagtcctaatcttactgagtttatcactaagttctgcattcaattcggtgagttttctcttggcttcttccaactctgttttaaactctccactatttccgcattcttcctcgcatttatctaaccattcaattagtttattaataactagttggtaatcagcgattcctatagccgttcttgtaattgtgggaacataattaggatcttctaatggattgtatggcttgatagcatcatctttatcattattagggggatggacaaccttaattggttggtcctcatctcctccagtagcgtgtggttcttcaatagccgtgttagtaataggcttaggcaaatgcttgtcgtacgcgggcacttcctcatccatcaagtatttataatcgggttctacgtctgaatattcttttctaagagacgcaacttctggagttagtagaagaactctgtttctatatctatcaacgctggaatcaatactcaagttaaggatagcgaatacctcatcgtcatcatccgtatcctctgaaacgccatcatatgacatttcatgaagtctaacgtattgataaacagaatcagatttagtattaaacagatccttaacctttttagtaaatgcatatgtatattttagatctccagatttcataatatggtcgcatgccttaaatgtcagtgcttccataatatagtctggaacactaattggtgatgaaaaagataccggaccatatgctacgttgataaataactctgagccactaactagataatgattaatgttaaggaagaggaaatattcagtgtataggtatgtcttggcgtcatatcttgtactaaacacgctaaacagtttgttaatgtgatcaatttccaatagattaattagagcagcaggaataccaacaaacatattaccacatccgtattttctatgaatatcacatatcatgttaaaaaatcttgatagaagagcgaatatctcgtctgacttaatgagtcgtagttcagcagcaacataagtcataactgtaaatagaacatactttcctgtagtgttgattctagactccacatcaacaccattattaaaaatagttttatatacatctttaatctgctctccgttaatcgtcgaacgttctagtatacggaaacactttgatttcttatctgtagttaatgacttagtgatatcacgaagaatattacgaattacatttcttgtttttcttgagagacctgattcagaactcaactcatcgttccatagtttttttacctcagtggcgaaatctttggagtgcttggtacatttttcaataaggttcgtgacctccatttattataaaaaaattttattcaaaacttaactacaatcgggtaattataaaatcgtagatctcccatgtggtggaatactaccatctatcgcatgtggatggacagtaggtaatggccatgggaacagtaatgtttgcatatttatctttcttgccagtattactgcatattgtcccaatgtttcgatgtgatgttctaacctatcaactgccgctgtatcacaacaatagtgtccgatgaaattaagattatgatccaatgtgtttaatatatgattatcaagtcttatacgatccgcgtcttttttgacaggatcaggttcttctacaggaagaagtttcggcctcttatgatattcatgtctgggaaacggtggtctagggtgaggctccggtatcggagtgggttttggattataatcatcatcgtctatgacatcatcttcgacttcgatatttattttgctatcttgatgatgtcctgtatcagttgcattttcagcactcgactgaatattagcgcattcattgtttattattaccatatttctaaacccaaaatgtatatgttgaacatcagtactatcgttgatgagtcttatagcatgaattcgcttatcgttatcgggtttagcttctgtcaccttagcaattccttttttattaaactctacataatcatatccatttctattgtttgttctaatataaacgagtatagcatcattgctaaatttttcaatagtatcgaaaacagaatatcctaaaccatataatatatattcaggaacactcaaactaaatgtccaggattctcctaaatacgtaaactttaatagtgcgaaatcattcaaaaatctaccacttatagatagatagtacataaatgcgtatagtagtctacctatctctttattatgaaaaccggcattacgatcatatatgtcgtgatatacctgtgatccgtttacgttaaaccataaatacatgggtgatcctataaacatgaatttatttctaattctcagagctatagttaattgaccgtgtaatatttgcttacatgcatacttgatacgctcattaataagatttttatcattgctcgttatctcagaatcgtatatataaggagtaccatcgtgattcttaccagatattatacaaaatactatatataaaatatattgaccaacgttagtaatcatataaatgtttaacgttttaaattttgtattcaatgatccattatcatacgctagcatggtcttatgatattcattctttaaaatataatattgtgttagccattgcattggggctcctaatggagattttttattctcatccattttaggataggctttcataaagtccctaataacttcgtgaataatgtttctatgttttctactgatgcatgtatttgcttcgatttttttatcccatgtttcatctatcatagatttaaacgcagtaatgctcgcaacattaacatcttgaaccgttggtacaattccgttccataaatttataatgttcgccatttatataactcattttttgaatatacttttaattaacaaaagagttaagttactcatatggacgccgtccagtctgaacatcaatctttttagccagagatatcatagccgctcttagagtttcagcgtgattttccaacctaaatagaacttcatcgttgcgtttacaacacttttctatttgttcaaactttgttgttacattagtaatctttttttccaaattagttagccgttgtttgagagtttcctcattgtcgtcttcatcggctttaacaattgcttcgcgtttagcctctggctttttagcagcctttgtagaaaaaaattcagttgctggaattgcaagatcgtcatctccggggaaaagagttccgtccatttaaagtacagattttagaaactgacactctgcgttatttatatttggtacaacacatggattataaatattgatgttaataacatcagaaaatgtaaagtctatacattgttgcatcgtgttaaattttctaatggatctagtattattgggtccaacttctgcctgaaatccaaatatggaagcggatacaaaaccgtttcctggataaaccacacatctccacttttgctttacatcagaaattgtgtcattgacatcttgaactctcctatctaatgccggtgttccacctatagattttgaatattcgaatgctgcatgagtagcattaaattccttaatattgccataattttcatatattgagtaaccctggataaaaagtaaacacaccgcagccgtcgctaccacaataaaaaaaattgatagagagttcatttataatctattagaagctgacaaaatttttttacacgcatcagacaatgctttaataaatagttcaacatctacttttgtcatatcgaaccgatggtatgattctaacctagaattacatccgaaaaagttgactatgttcatagtcattaagtcattaacaaacaacattccagactctggattataagacgatactgtttcgtcacaattacctaccttaatcatgtgattatgaatattggctattagagcaccttctaagaaatctataatatctttgaaacacgatttaaaatcaaaccacgaatatacttctacgaagaaagttagtttacccataggagaaataactataaatggagatctaaatacaaaatccggatctatgatagttttaacattattatattctctattaaatacctccacatctaaaaatgttaattttgaaactatgtcttcgtttattaccgtacctgaactaaacgctataagctctattgtttgagaactctttaaacgatattcttgaaatacatgtaacaaagtttcctttaactcggtcggtttatctaccatagttacagaatttgtatccttatctataatataataatcaaaatcgtataaagttatataattatcgcgttcagattgtgatcttttcaaatagactaaaaaccccatttctctagtaagtatcttatgtatatgtttgtaaaatatcttcatggtgggaatatgctctaccgcagttagccattcctcattgacagcggtagatgtattagacaaaactattccaatgtttaacaagggccattttacgagattattaaatccttgtttgataaatgtagccaatgagggttcgagttcaacgacgattgaattctcttcccgcggatgctgcatgatgaacgacgggatgttgttcgattgatttggaattctttttcgactttttgtttatattaaatattttaaaatttatagctgatagcaattcatgtactacggataatgtagacgcgtattgcgcatcgatatctttattattagataaatttatcaataaatgtgagaagtttgcctcgttaaggtcttccatttaaatattatataaacatttgtgtttgtatcttattcgtcttttatggaatagttttttactagtaaagctgcaattacacactttgtccgtaaaacataaatataaacaccagcttttatcaatcgttccaaaaagtcgacggcggacatttttaacatggcatctattttaaatacacttaggtttttggaaaaaacatcattttataattgtaacgattcaataactaaagaaaagattaagattaaacataagggaatgtcatttgtattttataagccaaagcattctaccgttgttaaatacttgtctggaggaggtatatatcatgatgatttggttgtattggggaaggtaacaattaatgatctaaagatgatgctattttacatggatttatcatatcatggagtgacaagtagtggagcaatttacaaattgggatcgtctatcgatagactttctctaaataggactattgttacaaaagttaataattatgatgatacattttttgacgacgatgattgatcgctattgcacaattttgtttttttactttctaatatagcgtttagattctttttcatgtgcgaatattgatttactaaaatatcgatgtttaacttttgttctatgacgtccttatcagcggtatcggtacatatacgtaattcaccttcacaaaatacggagtcttcgataataatagccaatcgattattggatctagcggtctgtatcatattcaacatgtttaatatatcctttcgtttcccctttacaggcatcgatcgtagcatattttccgcgtctgagatggaaatgttaaaactacaaaaatgcgtaatgttagcccgtcctaatattggtacgtgtctataagtttggcatagtagaataatagacgtgtttaaatgccttccaaagtttaagaattctattagagtattgcattttgatagtttatcgcctacatcatcaaaaataagtaaaaagtgtgctgattttttatgattttgtgcgacagcaatacatttttctatgttacttttagttcgtatcagattatattctagagattcctgactactaacgaaattaatatgatttggccaaatgtatccatcataatctggattataaacgggtgtaaacaagaatatatgtttatattttttaactagtgtagaaaacagagatagtaaatagatagtttttccagatccagatcctcccgttaaaaccattctaaacggcatttttaataaattttctcttgaaaattgtttttcttggaaacaattcataattatatttacagttactaaattaatttgataataaatcaaaatatggaaaactaaggtcgttagtagggaggagaacaaagaaggcatatcgtgatataaataacatttattatcatgatgacaccagaaaacgacgaagagcagacatctgtgttctccgctactgtttacggagacaaaattcagggaaagaataaacgcaaacgcgtgattggtctatgtattagaatatctatggttatttcactactatctatgattaccatgtccgcgtttctcatagtgcgcctaaatcaatgcatgtctgctaacgaggctgctattactgacgccgctgttgccgttgctgctgcatcatctactcatagaaaggttgcgtctagcactacgcaatatgatcacaaagaaagctgtaatggtttatattaccagggttcttgttatatattacattcagactaccagttattctcggatgctaaagcaaattgcactgcggaatcatcaacactacccaataaatccgatgtcttgattacctggctcattgattatgttgaggatacatggggatctgatggtaatccaattacaaaaactacatccgattatcaagattctgatatatcacaagaagttagaaagtatttttgtgttaaaacaatgaactaatatttatttttgtacattaataaatgaaatcgcttaatagacaaactgtaagtaggtttaagaagttgtcggtgccggccgctataatgatgatactctcaaccattattagtggcataggaacatttctgcattacaaagaagaactgatgcctagtgcttgcgccaatggatggatacaatacgataaacattgttatctagataccaacattaaaatgtctacagataatgcggtttatcagtgtcgtaaattacgagctagattgcctagacctgatactagacatctgagagtattgtttagtattttttataaagattattgggtaagtttaaaaaagaccaataataaatggttagatattaataatgataaagatatagatattagtaaattaacaaattttaaacaactaaacagtacgacggatgctgaagcgtgttatatatacaagtctggaaaactggttgaaacagtatgtaaaagtactcaatctgtactatgtgttaaaaaattctacaagtgacaacaaaaaatgaattaataataagtcgttaacgtacgccgccatggacgccgcgtttgttattactccaatgggtgttgactataacagatacattgtatgatgatctcgatatctcaatcatggactttataggaccatacattataggtaacataaaaactgtccaaatagatgtacgggatataaaatattccgacatgcaaaaatgctactttagctataagggtaaaatagttcctcaggattctaatgatttggctagattcaacatttatagcatttgtgccgcatacagatcaaaaaataccatcatcatagcatgcgactatgatatcatgttagatatagaagataaacatcagccattttatctattcccatctattgatgtttttaacgctacaatcatagaagcgtataacctgtatacagctggagattatcatctaatcatcaatccttcagataatctgaaaatgaaattgtcgtttaattcttcattctgcatatcagacggcaatggatggatcataattgatgggaaatgcaatagtaattttttatcataaaagttgtaaagtaaataataaaacaataaatattgaactagtagtacgtatattgagcaatcagaaatgatgctggtacctcttatcacggtgaccgtagttgcgggaacaatattagtatgttatatattatatatttgtaggaaaaagatacgtactgtctataatgacaataaaattatcatgacaaaattaaaaaagataaagagttctaattccagcaaatctagtaaatcaactgatagcgaatcagactgggaggatcactgtagtgctatggaacaaaacaatgacgtagataatatttctaggaatgagatattggacgatgatagcttcgctggtagtttaatatgggataacgaatccaatgttatggcgcctagcacagaacacatttacgatagtgttgctggaagcacgctgctaataaataatgatcgtaatgaacagactatttatcagaacactacagtagtaattaatgaaacggagactgttaaagtacttaatgaagataccaaacagaatcctaactattcatccaatcctttcgtaaattataataaaaccagtatttgtagcaagtcaaatccgtttattacagaacttaacaataaatttagtgagaataatccgtttagacgagcacatagcgatgattatcttaataagcaagaacaagatcatgaacacgatgatatagaatcatcggtcgtatcattggtgtgattagtttcctttttataaaattgaagtaatatttagtattattgctgccgtcacgttgtacaaatggagatattccctgtattcggcatttctaaaattagcaattttattgctaataatgactgtagatattatatagatacagaacatcaaaaaattatatctgatgagatcaatagacagatggatgaaacggtacttcttaccaacatcttaagcgtagaagttgtaaatgacaatgagatgtaccatcttattcctcatagattatcgacgattatactctgtattagttctgtcggaggatgtgttatctctatagataatgacgtcaatggcaaaaatattctaacctttcccattgatcatgctgtaatcatatccccactgagtaaatgtgtcgtagttagcaagggccctacaaccatactggttgctaaagcggatatacccagcaaacgattggtaacatcgtttacaaacgacatactgtatgtaaacaatctatcactgattaattatttgccgttgtctgtattcattattagacgagtcaccgactatttggatagacacatatgcgatcagatatttgctaataataagtggtattcccttataaccatcgacgataagcaatatcctattccatcaaattgtataggtatgtcttctgccaagtacataaattctagcatcgagcaagatactttaatacatgtttgtaacctcgagcatccattcgacttagtatacaaaaaaatgcagtcgtacaattctgtacctatcaaggaacaaatattgtacggtagaattgataatataaatatgagcattagtatttctgtggattaatagatttctagtatggggatcattaatcatctctaatctctaaatacctcataaaacgaaaaaaaagctattatcaaatactgtacggaatagattcattctcttctctttttatgaaactctgttgtatatctactgataaaactggaagcaaaaaatctgataaaaagaataagatcaagatcaaggattatatggaacacgattattataaaataacaatagttcctggttcctcttccacgtctactagctcgtggtattatacacatgcctagtaatagtctctttgcgttgatggaaagcagactagaaataacaggctaaaatgttcagacaccataatagttcccaacccagataataacagagtaccatcaacacattcctttaaactcaatcccaaacccaaaaccgttaaaatgtatccggccaattgatagtagataatgaggtgtacagcgcatgataatttacacagtaaccaaaatgaaaatactttagtaattataagaaatatagatggtaacgtcatcatcaacaatccaataatatgccggagagtaaacattgacggataaaacaaaaatgctccgcataactctatcatggcaataacacaaccaaatacttgtaagattcctaaattagtagaaaatacaacggatatcgatgtataagtgatctcgagaaataataagaataaagtaatgcccgtaaagataaacatcaacattgtttggtaatcattaaaccaattagtatgacgttgaactaatttcacagtaaattttattccagtattatccccgcatgtataagtacctggtaagatatctttatattccataatcaatgagacatcactatctgataacgaatgaagtctagcactagtatgccatttacttaatattgtcgtcttggaagttttattataagttaaaatatcatggttatccaatttccatctaatatactttgtcggattatctatagtacacggaataatgatggtatcattacatgctgtatactctatggtctttgtagttgttataacaaccaacgtatagaggtatatcaacgatattctaactcttgacattttttatttatttaaaatgatacctttgttatttattttattctattttgctaacggtattgaatggcataagtttgaaacgagtgaagaaataatttctacttacttattagacgacgtattatacacgggtgttaatggggcggtatacacattttcaaataataaactaaacaaaactggtttaactaataataattatataacaacatctataaaagtagaggatgcggataaggatacattagtatgcggaaccaataacggaaatcccaaatgttggaaaatagacggttcagacgacccaaaacatagaggtagaggatacgctccttatcaaaatagcaaagtaacgataatcagtcacaacggatgtgtactatctgacataaacatatcaaaagaaggaattaaacgatggagaagatttgacggaccatgtggttatgatttattcacggcggataacgtaattccaaaagatggtttacgaggagcattcgtcgataaagacggtacttatgacaaagtttacattcttttcactgatactatcggctcaaagagaattgttaaaattccgtatatagcacaaatgtgcctaaacgacgaaggtggtccatcatcgttgtctagtcatagatggtcgacgtttctcaaagtcgaattagaatgtgatatcgacggaagaagttatagataaattattcattctaaaactataaaaacagataatgatacgatactatatgtattcttcgatagtccgcattatgtacctattctatgaataccattaaacaatctttttctacgtcaaaattggaaggatatacaaagcaattgccgtctccagctcctggtatatgtctaccagctggaaaagttgttccacataccacgtttgaagtcatagaaaaatataatgtactagatgatattataaagcctttatctaaccaacctatcttcgaaggaccgtctggtgttaaatggttcgatataaaggagaaggaaaatgaacatcgggaatatagaatatacttcataaaagaaaattctatatattcgttcgatacaaaatctaaacaaactcgtagctcgcaagtcgatgcgcgactattttcagtaatggtaacttcgaaaccgttatttatagcagatatagggataggagtaggaatgccacaaatgaaaaaaatacttaaaatgtaatcttaatcgagtacaccacacgacaatgaacaaacataagacagattatgctggttatgcttgctgcgtaatatgcggtctaattgttggaattatttttacagcgacactattaaaagttgtagaacgtaaattagttcatacaccatcaatagataaaacgataaaagatgcatatattagagaagattgtcctactgactggataagctataataataaatgtatccatttatctactgatcgaaaaaacctgggaggaaggacgtaatgcatgcaaagctctaaatccaaattcggatctaattaagatagagactccaaacgagttaagttttttaagaagccttagacgaggctattgggtaggagaatccgaaatattaaaccagacaaccccatataattttatagctaaaaatgccacgaagaatggaactaaaaaacggaaatatatttgtagtacaacgaatactcccaaactgcattcgtgttacactatataacaattacactacatttttatcataacactacttcggttagatgttttagaaaaaaataaatatcgccgtaccgttcttgtttttataaaaataacaattaacaattatcaaattttttctttaatattttacgtggttgaccattcttggtggtaaaataatctcttagtgttggaatggaatgctgtttaatgtttccgcactcatcgtatattttgacgtatgcagtcacatcgtttacgcaatagtcagactgtagttctatcatgcttcctacatcagaaggaggaacagttttaaagtctcttggttttaatctattgccattagttttcatgaaatcctttgttttatccacttcacattttaaataaatgtccactatacattcttctgttaattttactagatcgtcatgggtcatagaatttataggttccgtagtccatggatccaaactagcaaacttcgcgtatacggtatcgcgattagtgtatacaccaactgtatgaaaattaagaaaacagtttaataaatcaacagaaatatttaatcctccgtttgatacagatgcgccatatttatggatttcggattcacacgttgtttgtctgaggtgttcgtctagtgttgcttctacgtaaacttcgattcccatatattctttattgtcagaatcgcataccgatttatcatcatacactgtttgaaaactaaatggtatacacatcaaaataataaataataacgagtacattctgcaatattgttatcgtaattggaaaattagtgttcgagtgagtcggattatgtgagtactggattgtatattttattttatattttgtaataagaataaaatgctaatgtcaagtttattccaatagatgtcttattaaaaaacatatataataaataacaatggctgaatggcataaaattatcgaggatatctcaaaaaataataagttcgaggatgccgccatcgttgattacaagactacaaagaatgttctagctgctattcctaacagaacatttgccaagattaatccgggtgaaattattcctctcatcactaatcgtaatattctaaaacctcttattggtcagaaatattgtattgtatatactaactctctaatggatgagaacacgtatgctatggagttgcttactgggtacgcccctgtatctccgatcgttatagcgagaactcataccgcacttatatttttgatgggtaagccaacaacatccagacgtgatgtgtatagaacgtgtagagatcacgctacccgtgtacgcgcaactggtaattaaaataaaaagtaatattcatatgtagtgtcaattttaaatgatgatgatgaaatggataatatccatattgacgatgtcaataatgccggtattggcatacagctcatcgatttttagatttcattcagaggatgtggaattatgttatgggcatttgtattttgataggatctataatgtagtaaatataaaatataatccgcatattccatatagatataattttattaatcgcacgttaaccgtagatgaactagacgataatgtcttttttacacatggttattttttaaaacacaaatatggttcacttaatcctagtttgattgtctcattatcaggaaacttaaaatataatgatatacaatgctcagtaaatgtatcgtgtctcattaaaaatttggcaacgagtacatctactatattaacatctaaacataagacttattctctacatcggtccacgtgtattactataataggatacgattctattatatggtataaagatataaatgacaagtataatgacatctatgattttactgcaatatgtatgctaatagcgtctacattgatagtgaccatatacgtgtttaaaaaaataaaaatgaactcttaattatgctatgctattagaaatggataaaatcaaaattacggttgattcaaaaattggtaatgttgttaccatatcgtataacttggaaaagataactattgatgttacacctaaaaagaaaaaagaaaaggatgtattattagcgcaatcagttgctgtcgaagaggcaaaagatgtcaaggtagaagaaaaaaatattatcgatattgaagatgacgatgatatggatgtagaaagcgcataatacgatctataaaaataagtatataataaatactttttatttacggtactcttgtagtggtgataccctactcaattatttttttaaaaaaatacttattctgattcttctagccatttccgtgttcgttcgaatgccacatcgacgttaaagataggggagtagttgaaatctagttctgcattgttggtacgcacctcaaatgtagtgttggatatcttcaacgtatagttgttgagtagtgatggttttctaaatagaattctcttcatatcattcttgcacgcgtacatttttagcatccatcttggaattctagatccttgttctattcccaatggtttcatcaatagaagattaaacatatcgtacgaacacgatggagagtaatcgtagcaaaagtaagcatttcctttaatcttagatcccggatactggatatattttgcagccaacacgtgcatccatgcagcatttcctacatatacccggctatgcaccgcgtcatcatcgactgtacgatacataatgttaccgtgttgcttacattgctcgtaaaagactttcgtcaatttgtctccttctccgtaaattccagtgggtcttaggcaacaagtatacaattttgctccattcatgattacggaattattggctttcataaccagttgctcggccatacgtttactttttgcgtatacatgtcctggtgatatatcataaagggtatgctcatggccgatgaatggatcaccgtgtttattgggtcctattgcttccatgctactagtatagatcaaatacttgattcctaggtccacacaagctgccaatatagtctgtgttccataatagtttactttcatgatttcattatcggtgtattttccaaatacatccactagagcagccgtatgaataatcagatttaccccatctagcgcttctctcaccttatcaaagtcgtttatatcacattgtatatagtttataaccttaactttcgaggttattggttgtggatcttctacaatatctatgactctgatttcttgaacatcatctgcactaattaacagttttactatatacctgcctagaaatccggcaccaccagtaaccgcgtacacggccattgctgccactcataatatcagactacttattctattttactaaataatggctgtttgtataatagaccacgataatatcagaggagttatttactttgaaccagtccatggaaaagataaagttttaggatcagttattggattaaaatccggaacgtatagtttgataattcatcgttacggagatattagtcaaggatgtgattccataggcagtccagaaatatttatcggtaacatctttgtaaacagatatggtgtagcatatgtttatttagatacagatgtaaatatatttacaattattggaaaggcgttatctatttcaaaaaatgatcagagattagcgtgtggagttattggtatttcttacataaatgaaaagataatacattttcttacaattaacgagaatggcgtttgatatatcagttaatgcgtctaaaacaataaatgcattagtttacttttctactcagcaaaataaattagtcatacgtaatgaagttaatgatacacactacactgtcgaatttgatagggacaaagtagttgacacgtttatttcatataatagacataatgacaccatagagataagaggggtgcttccagaggaaactaatattggttgcgcggttaatacgccggttagtatgacttacttgtataataagtatagttttaaactgattttagcagaatatataagacacagaaatactatatccggcaatatttattcggcattgatgacactagatgatttggctattaaacagtatggagacattgatctattatttaatgagaaacttaaagtagactccgattcgggactatttgactttgtcaactttgtaaaggatatgatatgttgtgattctagaatagtagtagctctatctagtctagtatctaaacattgggaattgacaaataaaaagtataggtgtatggcattagccgaacatatatctgatagtattccaatatctgagctatctagactacgatacaatctatgtaagtatctacgcggacacactgagagcatagaggatgaatttgattattttgaagacgatgattcgtctacatgttctgccgtaaccgacagggaaacggatgtataattttttttatagcgtgaaggatatgataaaaaatataattgttgtatttatcccattccaatcaccttatatgattctgtaaaaaaattatactgtaacacaataaaggagtcttatagatgtatagaggtcagatactggtttgataaactgtttattccacataagtatgtttgactttatggttagacccgcatactttaacaaatcactgaaaattggagttaggtattgacctctcagaatcagttgccgttctggaacattaaatgtattttttatgatatactccaacgcatttatgtgggcatacaacaagtcattactaatggagtattccaagagttttagttgtctagtatttaacaagagaagagatttcaacagactgtttatgaactcgaacgccgcctcattgtcgcttatattgatgatgtcgaattctcccaatatcatcactgatgagtagctcatcttgttatcgggatccaagttttctaaagatgtcattaaaccctcgatcatgaatggatttatcatcatcgtttttatgttggacatgagcttagtccgtttgtccacatctatagacgacgatttctgaattatttcatatatccctctctttaactccaggaacttgtcaggatggtctactttaatatgttctcgtctaagagatgaaaatctttggatggttgcacgcgacttttctttaaaggatgacgttgcccaagatcctctcttaaatgaatccatcttatccttggacaagatggacagtctattttccttagatggtttaatatttttgttacccatgatctataaaggtagacctaatcgtctcggatgaccatatatttattttcagttttattatacgcataaattgtaaaaaatatgttaggtttacaaaaatgtctcgtggggcattaatcgtttttgaaggattggacaaatctggaaaaacaacacaatgtatgaacatcatggaatctataccggcaaacacgataaaatatcttaactttcctcagagatccactgtcactggaaagatgatagatgactatctaactcgtaaaaaaacctataatgatcatatagttaatctattattttgtgcaaatagatgggagtttgcatcttttatacaagaacaactagaacagggaattactttaatagttgatagatacgcattttctggagtagcgtatgccgccgctaaaggcgcgtcaatgactctcagtaagagttatgaatctggattgcctaaacccgacttagttatattcttggaatctggtagcaaagaaattaatagaaacgtcggcgaggaaatttatgaagatgttacattccaacaaaaggtattacaagaatataaaaaaatgattgaagaaggagatattcattggcaaattatttcttctgaattcgaggaagatgtaaagaaggagttgattaagaatatagttatagaggctatacacacggttactggaccagtggggcaactgtggatgtaatagtgaaattacattttttataaatagatgttagtacagtgttataaatggatgaagcatattactctggcaacttggaatcagtactcggatacgtgtccgatatgcataccgaactcgcatcaatatctcaattagttattgccaagatagaaactatagataatgatatattaaacaaggacattgtaaattttatcatgtgtagatcaaacttggataatccatttatctctttcctagatactgtatatactattatagatcaagagatctatcagaccgaattgattaattcattagacgacaatgaaattatcgattgtatagttaacaagtttatgagcttttataaggataacctagaaaatatagtagatgctatcattactctaaaatatataatgaataatccagattttaaaactacgtatgccgaagtactcggttccagaatagccgatatagatattaaacaagtgatacgtaagaatatactacaattgtctaatgatatccgcgaacgatatttgtgaaaaatattaaaaaaaaatactttttttattaaatgacgtcgcttcgcgaatttagaaaattatgctgtgatatatatcacgcatcaggatataaagaaaaatctaaattaattagagactttataacagatagggatgataaatatttgatcattaagctattgcttcccggattagacgatagaatttataacatgaacgataaacaaattataaaattatatagtataatatttaaacaatctcaggaagatatgctacaagatttaggatacggatatataggagacactattaggactttcttcaaagagaacacagaaatccgtccacgagataaaagcattttaactttagaagaagtggatagttttttaactacgttatcatccgtaactaaagaatcgcatcaaataaaattattgactgatgtagcatctgtttgtacatgtaatgatttaaaatgtgtagtcatgcttattgataaagatctaaaaattaaagcgggccctcggtacgtacttaacgctattagtcctcatgcctatgatgtgtttagaaaatctaataacttgaaagagataatagaaaatgcatctaaacaaaatctagactctatatctatttctgttatgactccaattaatcccatgttagcggaatcgtgtgattctgtcaataaggcgtttaaaaaatttccatcaggaatgtttgcggaagtcaaatacgatggtgaaagagtacaagttcataaaaataataacgagtttgccttctttagtagaaacatgaaaccagtactctctcataaagtggattatctcaaagaatacataccgaaagcatttaaaaaagctacgtctatcgtattggattctgaaattgttcttgtagacgaacataatgtaccgctaccgtttggaagtttaggaatacacaaaaagaaagaatataaaaactctaacatgtgtttgttcgtgtttgactgtttgtactttgatggattcgatatgacggacattccattgtacgaacgaagatcttttctcaaagatgttatggttgaaatacccaatagaatagtattctcagagttgacgaatattagtaacgagtctcagttaactgacgtattggatgatgcactaacgagaaaattagaaggattggtcttaaaagatattaatggagtatacgaaccgggaaagagaagatggttaaaaataaagcgagactatttgaacgagggttccatggcagattctgccgatttagtagtactaggtgcctactatggtaaaggagcaaagggtggtatcatggcagtctttctaatgggttgttacgacgatgaatccggtaaatggaagacggttaccaagtgttcaggacacgatgataatacgttaagggagttgcaagaccaattaaagatgattaaaattaacaaggatcccaaaaaaattccagagtggttagtagttaataaaatctatattcccgattttgtagtagaggatccgaaacaatctcagatatgggaaatttcaggagcagagtttacatcttccaagtcccataccgcaaatggaatatccattagatttcctagatttactaggataagagaggataaaacgtggaaagaatctactcatctaaacgatttagtaaacttgactaaatcttaatagttacatacaaactgaaaattaaaataacaccatttagttggtggtcgccatggatggtgttattgtatactgtctaaacgcgttagtaaaacatggcgaggaaataaatcatataaaaaatgatttcatgattaaaccatgttgtgaaagagtttgtgaaaaagtcaagaacgttcacattggcggacaatctaaaaacaatacagtgattgcagatttgccatatatggataatgcggtatccgatgtatgcaattcactgtataaaaagaatgtatcaagaatatccagatttgctaatttgataaagatagatgacgatgacaagactcctactggtgtatataattattttaaacctaaagatgttattcctgttatcatatctataggaaaggataaagatgtctgtgaactattaatctcatcagacatatcgtgtgcatgcgtggagttaaattcatatcacgtagccattcttcccatgaatgtttccttttttaccaaaggaaatgcctcgttgattattctcctgtttgatttctctatcgatgcagcacctctcttaagaagtgtaaccgataataatgttattatatctagacaccagcgtctacatgacgagcttccgagttccaattggttcaagttttacataagtataaagtccgactattgttctatattatatatggttgttgatggatctgtgatgcatgcgatagctgataatagaactcacgcaattattagcaaaaatatattagacaatactacaattaacgatgagtgtagatgctgttattttgaaccacagattaggattcttgatagagatgagatgctcaatggatcatcgtgtgatatgaacagacattgtattatgatgaatttacctgatgtaggcgaatttggatctagtatgttggggaaatatgaacctgacatgattaagattgctctttcggtggctggtaatttaataagaaatcgagactacattcccgggagacgaggctatagctactacgtttacggtatagcctctagataatttttttaagcacgaaataaaaaacataattttaaaccaatctatttcatactattttgtgtgatcaccatggacataaagatagatattagtatttctggtgataaatttacggtgactactaggagggaaaatgaagaaagaaaaaaatatctacctctccaaaaagaaaaaactactgatgttatcaaacctgattatcttgagtacgatgacttgttagatagagatgagatgtttactattctagaggaatattttatgtacagaggtctattaggcctcagaataaaatatggacgactctttaacgaaattaaaaaattcgacaatgatgcggaagaacaattcggtactatagaagaactcaagcagaaacttagattaaattctgaagagggagcagataactttatagattatataaaggtacaaaaacaggatatcgtcaaacttactgtatacgattgcatatctatgataggattgtgtgcatgcgtggtagatgtttggagaaatgagaaactgttttctagatggaaatattgtttacgagcgattaaactgtttattaatgatcacatgcttgataagataaaatctatactgcagaatagactagtatatgtggaaatgtcatagaaagttaatgagagcaaaaatatataaggttgtattccatatttgttattttttctgtaatagttaaaaaaatacattcgatggtctatctatcagattattatgtgttataaggtactttttctcataataaactagagtatgagtaagatagtgtttttcaaaacatataaatctaaaattgatggatgagatatacagctattaatttcgaaaatatataaatctaaaattgatggataagatatacagctattaatttcgaaaatatattttaatctgataactttaaacatggatttttgatggtggtttaacgttttaaaaaaagattttgttattgtagtatatgataatattaaaagatggatataaagaatttgctgactgcatgtactattttttacattactacattggctacggcagatatacctactccgccaccaacgggtcatgtgacaagggagaatatcttgataagaggcataatcaatgttgtaatcggtgtccacctggagaatttgccaaggttagatgtaatggtaacgataacacaaaatgtgaacgctgcccacctcatacatataccacaatccccaattattctaatggatgtcatcaatgtagaaaatgcccaaccggatcatttgataaggtaaagtgtaccggaacacagaacagtaaatgttcgtgtcttcctggttggtattgcgctactgattcttcacagactgaagattgttgaaattgtgtaccaaaaaggagatgtccatgcggatactttggtggaatagatgaacaaggaaatcctatttgtaaatcgtgctgtattggtgaatattgcaactacctacgtaattatagacttgatccattttctccatgcaaactatctaaatgtaattaattatgattttgatgataatgttaccatacattatatcgctacttggttagtgtattattcagtatgaagacctattaataattacttatcttttgacgatcttgttataattataatataaaaacttatggcatagtaactcataattgctgacgcgataaattcgtaataatctgttttgttcaaatttttataaggaatctacaggcataaaaataaaaatataatttataatatactcttacagcgcgccatcatgaatagcagcagtaaattaattgctgttattaatggatttagaaatagtggacgattttgtgatattaatatagttattaatgatgaaaggataaacgctcacagactcatcctatctggagcctccgaatatttttccattctgttttccaataattttatcgattctaatgaatacgaagttaatctaagtcatttagattatcaaagtgttaacgatttgatcgattacatttatgggatacctttgagcctaactaacgataacgtgaaatatattctttcaaccgctgattttttacaaattggatctgccattactgagtgcgaaaaatacatacttaaaaatctttgttctagaaactgtatcgatttctacatatacgctgataaatataataacaagaaaatagaatcagcgtcgtttaacacaatattacgaaatattttgagactcatcaacgatgaaaactttaaatacttaacagaggaatcaatgataaaaattttaagcgatgatatgttaaatataaaaaatgaggattttgcaccactaattctcattaaatggttagagagtactcaacaatcatgcaccgtcgagttacttagatgcctcagaatatcattgctttccccacaagttataaaatcactttatagtcatcaactggttagttcaatctacgaatgtataacattcttaaacaatatagcattcttggatgaatcatttcctagataccatagcatcgagttgatatctatcggtataagtaattcgcatgataagatttccataaactgctacaatcataaaaaaaatacatgggaaatgatatcttcacgtagatataggtgtagtttcgcagtggccgtcctggataatattatctatatgatgggtggatatgatcagtccccgtatagaagttcaaaggttatagcgtacaatacatgtacaaattcttggatatatgatataccagagctaaaatatcctcgttctaattgtgggggactggctgatgacgaatacatttattgtataggcggcatacgcgatcaggattcatcgttgacatctagtattgatagatggaagccatcaaaaccatattggcagaagtatgctaaaatgcgcgaaccaaaatgtgatatgggggttgcgatgttaaacggattaatatatgtcatgggtggaatcgttaaaggtgacacgtgtaccgacgcactagagagtttatcagaagatggatggatgaagcatcaacgtcttccaataaaaatgtccaatatgtcgacgattgttcatgatggcaagatttatatatctggaggttacaacaatagtagtgtagttaatgtaatatcgaatctagtccttagctataatccgatatatgatgaatggaccaaattatcatcattaaacattcctagaattaatcccgctctatggtcagcgcataataaattatatgtaggaggaggaatatctgatgatgttcgaactaatacatctgaaacatacgataaagaaaaagattgttggacattggataatggtcacgtgttaccacgcaattatataatgtataaatgcgaaccgattaaacataaatatccattggaaaaaacacagtacacgaatgattttctaaagtatttggaaagttttataggtagttgatagaacaaaatacataattttgtaaaaataaatcactttttatactaatatgacacgattaccaatacttttgttactaatatcattagtatacgctacaccttttcctcagacatctaaaaaaataggtgatgatgcaactctatcatgtaatcgaaataatacaaatgactacgttgttatgagtgcttggtataaggtaccaaaaattgaaaataaatacaaaggttcttgagggttgtgttaaattgaaagcgagaaataatcataaatactgcagaccatgaagagcgccgttctcttcctcctggggatcattttccttgaacaatgcggtgttcgggggacacttgttattaggaacgcacgatgctcctgtattagcacctccagaggaacgatacattacaagtcactcaaagacttgaaacaattcgcgccctcccctaattgcaataagacagagataattgcgacattgaaaaacggggaccaaacttgtcttgatcctgacagcgccaatgtaaaaaaactcatgaaggagtgggaaaaaaaaattagtcaaaaaaaaaaacagaagcgcggtaagaaacaccaaaaaaacatgaaaaataggaagcctaaaacacctcaaagccgccgaaggtctcggaaaacaacctgattaattaatttttattagtagaatttcattttgtttttttctatgctataaataccatgtgtccacaaaagcttacgatctcatggttcgccattgtcctcctggtttcacctctgatggcgatgtgggagctggaaaaagacgtctatgtagtcgaagttgactggactccagatgcgcctggggagacggtcaatctcacttgcgacaccccggaagaagatgacatcacctggaccagcgatcagcggcatggtgttattggaagtggcaaaactctcacaatcacggttaaggagttcctggatgctgggcagtatacgtgccataagggaggggaaacgttgtctcattcccacctgttgctgcacaagaaggagaacggaatttggtctaccgaaattcttaagaattttaagaacaaaacttttcttaaatgcgaggcaccgaattattccgggaggtttacgtgttcctggcttgttcagcggaatatggaccttaaatttaacattaaaagtagcagcagctctccagactcacgagcagtcacgtgtggaatggcttcactttccgcagaaaaagttactcttgatcagcgggattacgaaaagtatagtgtctcttgccaagaggacgtaacttgtccgaccgcagaggagacgctccccatagagctggccctcgaagcaagacaacagaataagtatgaaaattatagtaccagtttcttcattagggatatcataaaaccagacccacccaaaaaccttcaaatgaaaccactgaagaattctcaagtagaagtcagctgggagtatcctgacagttggagcactccgcacagctattttagccttaagttcttcgttcgaatccaacgaaagaaggaaaaaatgaaagagacggaagaaggttgcaaccagaagggtgcctttctggttgaaaaaacatccacagaagttcaatgtaaaggagggaacgtatgcgtacaagcacaagataggtattacaatagttcatgcagtaagtgggcatgtgtgccctgccgggttcgcagcggtggcggtggaagtggaggcggcgggagcggcggtgggggatctagagtaatccctgtcagtggcccagcacgatgcctctcacagtctcggaacctgttgaaaactactgacgatatggtaaaaacggcacgagaaaagttgaaacattactcttgcacagccgaagatatcgaccatgaagacataacccgggatcaaacgtcaacgttgaaaacttgtctccctctcgaacttcacaagaatgaatcctgtctggccacgagggagacgtctagtacgacgcggggttcatgccttcccccccaaaaaacatcacttatgatgacgctgtgtctgggctctatctacgaggacctcaaaatgtatcaaacggagtttcaagcgataaacgcagcgcttcagaaccataaccaccagcagattatactcgataagggaatgctcgtagccattgatgaactgatgcaatcccttaaccataacggggagacattgcgacagaagcctcccgtcggagaagccgacccgtaccgcgttaaaatgaagctgtgtatccttctgcatgcattttcaacccgagtcgtcacgataaacagggtcatggggtatctttcaagcgcgtgattaattaagagctcatgcggatctttatgatacgtacaatgataatgatacagtaccaccaactactgtaggcggtagtacaacctctattagcaattataaaaccaaggactttgtagaaatatttggtattaccgcattaattatattgtcggccgtggcaatattctgtattacatattatatatataataaacgttcacgtaaatacaaaacagagaacaaagtctagatttttgacttacataaatgtctgggatagtaaaatctatcatattgagcggaccatctggttcaggaaagacagccatagccaaaagactatgggaatatatttggatttgtggtgtcccataccactagatttcctcgtcctatggaacgagaaggtgtcgattaccattacgttaacagagaggccatctggaagggaatagccgccggaaactttctagaacatactgagtttttaggaaatatttacggaacttctaaaactgctgtgaatacagcggctattaataatcgtatttgtgtgatggatctaaacatcgatggcgttagaagtcttaaaaatacgtacctaatgccttactcggtgtatataagacctacctctcttaaaatggttgagaccaagcttcgttgtagaaacactgaagcggatgatgagattcatcgtcgtgtgatgttggcaaaaactgacatggatgaggcaggtgaagccggtctattcgacactattatcattgaagatgatgtgaatttagcatatagtaagttaattcagatactacaggaccgtattagaatgtattttaacactaattagagacttaagacttaaaacttgataattaataatataactcgtttttatatgtggctatttcaacgtctaatgtattagttaaatattaaaacttaccacgtaaaacttaaaatttaaaatgatatttcattgacagatagatcacacattatgaactttcaaggacttgtgttaactgacaattgcaaaaatcaatgggtcgttggaccattaataggaaaaggtggattcggtagtatttatactactaatgacaataattatgtagtaaaaatagagcccaaagctaacggatcattatttaccgaacaggcattttatactagagtacttaaaccatccgttatcgaagaatggaaaaaatctcacaatataaagcacgtaggtcttatcacgtgcaaggcatttggtctatacaaatccattaatgtggaatatcgattcttggtaattaatagattaggtgcagatctagatgcggtgatcagagccaataataatagattaccaaaaaggtcggtgatgttgatcggaatcgaaatcttaaataccatacaatttatgcacgagcaaggatattctcacggagatattaaagcgagtaatatagtcttggatcaaatagataagaataaattatatctagtggattacggattggtttctaaattcatgtctaatggcgaacatgttccatttataagaaatccaaataaaatggataacggtactctagaatttacacctatagattcgcataaaggatacgttgtatctagacgtggagatctagaaacacttggatattgtatgattagatggttgggaggtatcttgccatggactaagatatctgaaacaaagaattgtgcattagtaagtgccacaaaacagaaatatgttaacaatactgcgactttgttaatgaccagtttgcaatatgcacctagagaattgctgcaatatattaccatggtaaactctttgacatattttgaggaacccaattacgacgagtttcggcacatattaatgcagggtgtatattattaagtgtggtgtttggtcgatgtaaaatttttgtcgataaaaattaaaaaataacttaatttattattgatctcgtgtgtacaaccgaaatcatggcgatgttttacgcacacgctctcggtgggtacgacgagaatcttcatgcctttcctggtaccaaaaattgaaaaactagcgtctttttttgctcgactgcagaccatggagacacccaagcctaggatactgccctggctcgtgagccagctcgatctcggccaactcgaaggtgtcgcttggttggacgagtcaaggacaagattcagaataccctggaagcatggcctgagacaggatgctcagatggccgattttggtatttttcaagcttgggccgaagcttctggtgcttacacccccggcaaggataaacctgatgtgtccacttggaaacggaatttccggtctgccttgaaccggaaggaagtgttgcgcctcgccgcagataactctaaagatccttacgaccctcacaaagtttatgagtttgttactcccggggcaagagattttgtgcatcttggggcttcacccgatactaatggaaaaagtagtcttccccacagtcaggagaatcttcccaaactttttgatgggcttattctcgggcccttgaaggatgaggggagttccgatttggcaatagtctctgacccaagccagcaactgccatcaccaaacgtcaacaattttctcaatccagccccccaagagaacccccttaaacagcttcttgccgaggagcaatgggagttcgaagttactgccttctatcgcgggaggcaggtattccaacaaaccttgttttgtccaggaggcttgagactcgtgggcagcactgctgatatgactctgccctggcagccagtgaccctccccgaccctgaagggttcctgactgacaaactcgtgaaggagtacgtgggacaagtactgaagggcctgggaaatggtcttgccctctggcaagctggacagtgcttgtgggctcaacgccttggacattcacacgcattttgggccctcggggaggagcttcttcctgacagtggccgcggaccagatggcgaggtacataaggataaagatggtgcagtcttcgacctcagaccatttgtcgcagaccttatcgccttcatggaaggttccggtcacagccctagatatacactttggttctgtatgggggaaatgtggccacaagatcaaccttgggtcaagcgccttgttatggtaaaggtggtccctacatgtttgaaagagctgctcgaaatggctcgggaaggaggagcctcttctttgaaaactgtagacctgcacatatctaacagccaaccaatcagcctgacctccgatcagtacaaagcttaccttcaagaccttgtcgaggacatggacttccaagccacaggcaacatttgattaattaatttttatgagctcctggtaaaagttaaacttggggagaatgatacagaaaatctttcttctactatatcggcggcaccatcgaggtaaccacctctcaagaagaccgcgtgaataatgtactcatgaaacgtttggaaactatacgccatatgtggtctgttgtatatgatcattttgatattgtgaatggtaaagaatgctgttatgtgcatacgcattcatctaatcaaaatcctataccgagtactgtaaaaacaaatttgtacatgaagactatgggatcatgcattcaaatggattccatggaagctctagagtatcttagcgaactgaaggaatcaggtggatggagtcccagaccagaaatgcaggaatttgaatatccagatggagtggaagacactgaatcaattgagagattggtagaggagttcttcaatagatcagaacttcaggctggtaaattagtcaaatttggtaattctattaattgttaaacatacatctgtttcagctaagcaactaagaacacgtatacggcagcagcttccttttatactctcatcttttaccaacacaaagggtggatatttgttcattggagttgataataatacacacaaagtatttggattcacggtgggttacgactacctcagactgatagagaatgatatagaaaagcatatcaaaagactttgtgttgtgcatttctgtgagaagaaagaggacatcaagtacacgtgtcgattcatcaaggtatataaacctggggatgaggctacctcgacatacgtgtgcgctatcaaagtggaaagatgctgttgtgctgtgtttgcagattggccagaatcatggtatatggatactaatggtatcaagaagtattctccagatgaatgggtgtcacatataaaattttaattaatgtaactatagagaacaaataataggttgtaatatcatatagacaataactaacaattaattagtaactgttatctcttttttaactaaccaactaactatatacctattaatacatcgtaattatagttcttaacatctattaatcattgattcgcttctttaattttttataaactaacattgttaattgaaaagggataacatgttacagaatataaattatatatggatttttttaaaaaggaaatacttgactggagtgtatatttatctcttcattatatagcacgcgtgtgttccaattcttccacatcccatataatacaggattataatctcgttcgaacatacgagaaagtggataaaacaatagttgattttttatctaggttgccaaatttattccatattttagaatatggggaaaatattctacatatttattctatggatgatgctaatacgaatattataattttttttctagatagagtattaaatattaataagaacgggtcatttatacacaatctcaggttatcatcatccattaatataaaagaatatgtatatcaattagttaataatgatcatccagataataggataagactaatgcttgaaaatggacgtagaacaagacattttttgtcctatatatcagatacagttaatatctatatatgtattttaataaatcatggattttatatagatgcagaagacagttacggttgtacattattacatagatgtatatatcactataagaaatcagaatcagaatcatacaatgaattaattaagatattgttaaataatggatccgatgtagataaaaaagatacgtacggaaacacaccttttatcctattatgtaaacacgatatcaacaacgtggaattgtttgagatatgtttagagaatgctaatatagactctgtagactttaatagatatacacctcttcattatgtctcatgtcgtaataaatatgattttgtaaagttattaatttctaaaggagcaaatgttaatgcgcgtaataaattcggaactactccattttattgtggaattatacacggtatctcgcttataaaactatatttggaatcagacacagagttagaaatagataatgaacatatagttcgtcatttaataatttttgatgctgttgaatctttagattatctattatccagaggagttattgatattaactatcgtactatatacaacgaaacatctatttacgacgctgtcagttataatgcgtataatacgttggtctatctattaaacagaaatggtgattttgagacgattactactagtggatgtacatgtatttcggaagcagtcgcaaacaacaacaaaataataatggaagtactattgtctaaacgaccatctttgaaaattatgatacagtctatgatagcaattactaaaaataaacaacataatgcagatttattgaaaatgtgtataaaatatactgcgtgtatgaccgattatgatactcttatagatgtacagtcgctacagcaatataaatggtatattttaaaatgtttcgatgaaatagatatcatgaagagatgttatataaaaaataaaactgtattccaattagttttttgtatcaaagacattaatactttaatgagatatggtaaacatccttctttcgtgaagtgcactagtctcgacgtatacggaagtcgtgtacgtaatatcatagcatctattagatatcgtcagagattaattagtctattatccaagaagctggatgcgggagataaatggtcgtgttttcctaacgaaataaaatataaaatattggaaaactttaacgataacgaactatccacatatctaaaaatcttataaacactattaaaatataaaatctaagtaggataaaatcacactacatcattgtttccttttagtgctcgacagtgtatactatttttaacactcataaataaaaatgaaaacgatttccgttgttacgttgttatgcgtactacctgctgttgtttattcaacatgtactgtacccactatgaataacgctaaattaacgtctaccgaaacatcgtttaatgataaacagaaagttacatttacatgtgatcagggatatcattctttggatccaaatgctgtctgcgaaacagataaatggaaatacgaaaatccatgcaagaaaatgtgcacagtttctgattatgtctctgaattatatgataagccattatacgaagtgaattccaccatgacactaagttgcaacggcgaaacaaaatattttcgttgcgaagaaaaaaatggaaatacttcttggaatgatactgttacgtgtcctaatgcggaatgtcaacctcttcaattagaacacggatcgtgtcaaccagttaaagaaaaatactcatttggggaatatatgactatcaactgtgatgttggatatgaggttattggtgcttcgtacataagttgtacagctaattcttggaatgttattccatcatgtcaacaaaaatgtgatataccgtctctatctaatggattaatttccggatctacattttctatcggtggcgttatacatcttagttgtaaaagtggttttatactaacgggatctccatcatccacatgtatcgacggtaaatggaatcccatactcccaacatgtgtacgatctaacgaaaaatttgatccagtggatgatggtcccgacgatgagacagatttgagcaaactctcgaaagacgttgtacaatatgaacaagaaatagaatcgttagaagcaacttatcatataatcatagtggcgttaacaattatgggcgtcatatttttaatctccgttatagtattagtttgttcctgtgacaaaaataatgaccaatataagttccataaattgctaccgtaaatataaatccgttaaaataattaataatttaataacaaacaagtatcaaaagattaaagacttatagctagaatcaattgagatgtcttcttcagtggatgttgatatctacgatgccgttagagcatttttactcaggcactattataacaagagatttattgtgtatggaagaagtaacgccatattacataatatatacaggctatttacaagatgcgccgttataccgttcgatgatatagtacgtactatgccaaatgaatcacgtgttaaacaatgggtgatggatacacttaatggtataatgatgaatgaacgcgatgtttctgtaagcgttggcaccggaatactattcatggaaatgtttttcgattacaataaaaatagtatcaacaatcaactaatgtatgatataattaatagcgtatctataattctagctaatgagagatatagaagcgcttttaacgacgatggtatatacatccgtagaaatatgattaacaagttgtacggatacgcatctctaactactattggcacgatcgctggaggtgtttgttattatctgttgatgcatctagttagtttgtataaataattatttcaatatactagttaaaattttaagattttaaatgtataaaaaactaataacgtttttatttgtaataggtgcattagcatcctattcgaataatgagtacactccgtttaataaactgagtgtaaaactctatatagatggagtagataatatagaaaattcatatactgatgataataatgaattggtgttaaattttaaagagtacacaatttctattattacagagtcatgcgacgtcggatttgattccatagatatagatgttataaacgactataaaattattgatatgtataccattgactcgtctactattcaacgcagaggtcacacgtgtagaatatctaccaaattatcatgccattatgataagtacccttatattcacaaatatgatggtgatgagcaacaatattctattactgcagagggaaaatgctataaaggaataaaatatgaaataagtatgatcaacgatgatactctattgagaaaacatactcttaaaattggatctacttatatatttgatcgtcatggacatagtaatacatattattcaaaatatgatttttaaaaatttaaaatatattatcacttcagtgacagtagtcaaataacaaacaacaccatgagatatattataattctcgcagttttgttcattaatagtatacacgctaaaataactagttataagtttgaatccgtcaattttgattccaaaattgaatggactggggatggtctatacaatatatcccttaaaaattatggcatcaagacgtggcaaacaatgtatacaaatgtaccagaaggaacatacgacatatccgcatttccaaagaatgatttcgtatctttctgggttaaatttgaacaaggcgattataaagtggaagagtattgtacgggactatgcgtcgaagtaaaaattggaccaccgactgtaacattgactgaatacgacgaccatatcaatttgtacatcgagcatccgtatgctactagaggtagcaaaaagattcctatttacaaacgcggtgacatgtgtgatatctacttgttgtatacggctaacttcacattcggagattctaaagaaccagtaccatatgatatcgatgactacgattgcacgtctacaggttgcagcatagactttgtcacaacagaaaaagtgtgcgtgacagcacagggagccacagaagggtttctcgaaaaaattactccatggagttcgaaagtatgtctgacacctaaaaagagtgtatatacatgcgcaattagatccaaagaagatgttcccaatttcaaggacaaaatggccagagttatcaagagaaaatttaataaacagtctcaatcttatttaactaaatttctcggtagcacatcaaatgatgttaccacttttcttagcatgcttaacttgactaaatattcataactaatttttattaatgatacaaaaacgaaataaaactgcatattatacactggttaacgcccttataggctctaaccattttcaagatgaggtccctgattatagtccttctgttcccctctatcatctactccatgtctattagacgatgtgagaagactgaagaggaaacatggggattgaaaatagggttgtgtataattgccaaagatttctatcccgaaagaactgattgcagtgttcatctcccaactgcaagtgaaggattgataactgaaggcaatggattcagggatatacgaaacaccgataaattataaaaaaagcaatgtgtccgctgtttccgttaataatactattttcgtaactggcggattattcataaataactctaatagcacgatcgtggttaacaatatggaaaaacttgacatttataaagacaaacaatggtcgattatagaaatgcctatggctagggtatatcacggcatcgactcgacatttggaatgttatattttgccggaggtctatccgttaccgaacaatatggtaatttagagaaaaacaacgagatatcttgttacaatcctagaacgaataagtggtttgatatttcatatactatttataagatatccatatcatcattgtgtaaactaaataacgtcttctatgtatttagtaaggacattggatatgtggaaaagtatgatggtgcatggaagttagtacatgatcgtctccccgctataaaggcattatcaacttctccttattgattgaaaatgaaaatataaatagtttttatgtatagcagtattaccctatagttttattgcttactactaacatggatacagatgttacaaatgtagaagatatcataaatgaaatagatagagagaaagaagaaatactaaaaaatgtagaaattgaaaataataaaaacattaacaagaatcatccaagtggatatattagagaagcactcgttattaatacaagtagtaatagtgattccattgataaagaagttatagaatgtatcagtcacgatgtaggaatatagatcatatctactaatttttataatcgatacaaaacataaaaaacaactcgttattacatagcaggcatggaatccttcaagtattgttttgataacgatggcaagaaatggattatcggaaatactttatattctggtaattcaatactatataaggtcagaaaaaatttcactagttcgttctacaattacgtaatgaaaatagatcacaaatcacacaagccattgttgtctgaaatacgattctatatatctgtattggatcctttgactatcgacaactggacacgggaacgtggtataaagtatttggctattccagatctgtatggaattggagaaaccgatgattatatgttcttcgttataaagaattcgggaagagtattcgccccaaaggatactgaatcagtcttcgaagcatgcgtcactatgataaacacgttagagtttatacactctcgaggatttacccatggaaaaatagaaccgaggaatatactgattagaaataaacgtctttcactaattgactattctagaactaacaaactatacaagagtggaaactcacatatagattacaacgaggacatgataacttcaggaaatatcaattatatgtgtgtagacaatcatcttggagcaacagtttcaaaacgaggagatttagaaatgttgggatattgcatgatagaatggttcggtggcaaacttccatggaaaaacgaaagtagtataaaagtaataaaacaaaaaaaagaatataaaaaatttatagctactttctttgaggactgttttcctgaaggaaatgaacctctggaattagttagatatatagaattagtatacacgttagattattctcaaactcctaattatgacagactacgtaaactgtttatacaagattgaaattatattctttttttatagagtgtggtagtgttacggatatctaatattaatattagactatctctatcgcgctacacgaccaatatcgattactatggatatcttcagggaaatcgcatcttctatgaaaggagagaatgtattcatttctccagcgtcaatctcgtcagtattgacaatactgtattatggagctaatggatccactgctgaacagctatcaaaatatgtagaaacggaggagaacacggataaggttagcgctcagaatatctcattcaaatccatgaataaagtatatgggcgatattctgccgtgtttaaagattcctttttgagaaaaattggcgataagtttcaaactgttgacttcactgattgtcgcactatagatgcaatcaacaagtgtgtagatatctttactgaggggaaaatcaatccactattggatgaaccattgtctcctgatacctgtctcctagcaattagtgccgtatactttaaagcaaaatggttgatgccattcgaaaaggaatttaccagtgattatcccttttacgtatctccgacggaaatggtagatgtaagtatgatgtctatgtacggcaaggcatttaatcacgcatctgtaaaggaatcattcggcaacttttcaatcatagaactgccatatgttggagatactagtatgatggtcattcttccagacaagattgatggattagaatccatagaacaaaatctaacagatacaaattttaagaaatggtgtaactctctggaagctacgtttatcgatgttcacattcccaagtttaaggtaacaggttcgtataatcttgtggatactctagtaaagtcaggactgacagaggtgttcggttcaactggagattatagcaatatgtgtaattcagatgtgagtgtcgacgctatgattcacaaaacgtatatagatgtcaatgaagagtatacagaagcagctgcagcaacttgtgcactggtgtcagactgtgcatcaacaattacaaatgagttctgtgtagatcatccgttcatctatgtgattaggcatgttgatggaaaaattcttttcgttggtagatattgctctccgacaactaattgttaaccattttttttaaaaaaatagaaaaaacatgtggtattagtgcaggtcgttgttcttccaattgcaattggtaagatgacggccaactttagtacccacgtcttttcaccacagcactgtggatgtgacagactgaccagtattgatgacgtcagacaatgtttgactgaatatatttattggtcgtcctatgcataccgcaacaggcaatgcgctggacagttgtattccacactcctctcttttagagatgatgcggaatcagtgttcatcgacattcgcgagctggtaaaaaatatgccgtgggatgatgtcaaagattgtacagaaatcatccgttgttatataccggatgagcaaaaaaccatcagagagatttcggccatcatcggactttgtgcatatgctgctacttactggggaggtgaagaccatcccactagtaacagtctgaacgcattgtttgtgatgcttgagatgctcaattacgtggattataacatcatattccggcgtatgaattgatgagttgtacatcttgacattttctttcttctcttctccctttcttctcttctcccttcctccctcttctccctttcccagaaacaaacttttttacccactataaaataaaatgagtatactacctattatatttcttcctatatttttttattcttcattcgttcagacttttaacgcgcctgaatgtatcgacaaagggcaatattttgcatcattcatggagttagaaaacgagccagtaatcttaccatgtcctcaaataaatacgctatcatccggatataatatattagatattttatgggaaaaacgaggagcggataatgatagaattataccgatagataatggtagcaatatgctaattctgaacccgacacaatcagactctggtatttatatatgcattaccacgaacgaaacctactgtgacatgatgtcgttaaatttgacaatcgtgtctgtctcagaatcaaatatagatcttatctcgtatccacaaatagtaaatgagagatctactggcgaaatggtatgtcccaatattaatgcatttattgctagtaacgtaaacgcagatattatatggagcggacatcgacgccttagaaataagagacttaaacaacggacacctggaattattaccatagaagatgttagaaaaaatgatgctggttattatacatgtgttttagaatatatatacagaggtaaaacatataacgtaaccagaattgtaaaattagaggtacgggataaaataataccttctactatgcaattaccagatggcattgtaacttcaataggtagtaatttgactattgcgtgtagagtatcgttgagacctcccacaacggatgcagacgtcttttggataagtaatggtatgtattacgaagaagatgatggggacggagacggtagaataagtgtagcaaataaaatctatatgaccgataagagacgtgttattacatcccggttaaacattaatcctgtcaaggaagaagatgctacaacgtttacgtgtatggcgtttactattcctagcatcagcaaaacagttactgttagtataacgtgaatgtatgttgttacatttccatgtcaattgagtttataagaatttttatacattatcttccaacaaacaattgacgaacgtattgctatgattaactcccacgatactatgcatattattaatcattaacttgcagactatacctagtgctattttgacatactcatgttcttgtgtaattgcggtatctatattattaaagtacgtaaatctagctatagttttattatttaattttagataatataccgtctccttatttttaaaaattgccacatcctttattaaatcatgaatgggaatttctatgtcatcgttagtatattgtgaacaacaagagcagatatctataggaaagggtggaatgcgatacattgatctatgtagttttaaaacacacgcgaactttgaagaatttatataaatcattccatcgatacatccttctatgttgacatgtatatatccaggaattcttttattaatgtcaggaaatgtataaactaaaacattgcccgaaagcggtgcctctatctgcgttatatccgttcttaacttacaaaatgtaaccaatacctttgcatgacttgttttgttcggcaacgttagtttaaacttgacgaatggattaattacaatagcatgatccgcgcatctattaagtttttttactttaacgcccttgtatgtttttacagagactttatctaaatttctagtacttgtatgtgttataaatataacgggatatagaactgaatcacctaccttagatacccaattacattttatcagatccagataataaacaaattttgtcgccctaactaattctatattgttatatattttacaattggttatgatatcatgtaataacttggagtctaacgcgcatcgtcgtacgtttatacaattgtgatttagtgtagtatatctacacatgtatttttccgcactatagtattctggactagtgataaaactatcgttatatctgtcttcaatgaactcatcgagatattgctctctgtcatattcatacacctgcataaactttctagacatcttacaatccgtgttattttaggatcatatttacatatttacgggtatatcaaagatgttagattagttaatgggaatcgtctataataatgaatattaaacaattatatgaggacttttaccacaaagcatcataaaaatgagtcgtcgtctgatttatgttttaaatatcaaccgcaaatcaactcataaaatacaagagaatgaaatatatacatattttagtcattgcaatatagaccatacttctacagaacttgattttgtagttaaaaactatgatctaaacagacgacaacatgtaactgggtatactgcactacactgctatttgtataataattactttacaaacgatgtactgaagatattattaaatcatgacgtaaatgtaacgatgaaaaccagtagcggacgtatgcctgtttatatattgcttactagatgttgcaatatttcacatgatgtagtgatagatatgatagacaaagataaaaaccacttattacatagagactattccaacctattactagagtatataaaatctcgttacatgttattaaaggaagaggatatcgatgagaacatagtatccactttattagataagggaatcgatcctaactttaaacaagacggatatacagcgttacattattattatttgtgtctcgcacacgtttataaaccaggtgagtgtagaaaaccgataacgataaaaaaggccaagcgaattatttctttgtttatacaacatggagctaatctaaacgcgttagataattgtggtaatacaccattccatttgtatcttagtattgaaatgtgtaataatattcatatgactaaaatgctgttgacttttaatccgaatttcaaaatatgtaataatcatggattaacgcctatactatgttatataacttccgactacatacaacacgatattcttgttatgttaatacatcactatgaaacaaatgttggagaaatgccgatagatgagcgtcgtatgatcgtattcgagtttatcaaaacatattctacacgtccggcagattcgataacttatttgatgaataggtttaaaaatataaatatttatacccgctatgaaggaaagacattattacacgtagcatgtgaatataataatacacacgtaatagattatcttatacgtatcaacggagatataaatgcgttaaccgacaataacaaacacgctacacaactcattatagataacaaagaaaattccccgtataccatcgattgtttactgtatatacttagatatattgtagataagaatgtgataagatcgttggtggatcaacttccatctctacctatcttcgatataaaatcatttgagaaattcatatcctactgtatacttttagatgacacattttacgataggcacgttaagaatcgcgattctaaaacgtatcgatacgcattttcaaaatacatgtcgtttgataaatacgatggtataataactaaatgtcacgacgaaacaatgttactcaaactgtccactgttctagacactacactatatgcagttttaagatgccataattcgaaaaagttaagaagatacctcaacgagttaaaaaaatataataacgataagtcctttaaaatatattctaatattatgaatgagagataccttaatgtatattataaagatatgtacgtgtcaaaggtatatgataaactatttcctgttttcacagataaaaattgtctactaacattactaccttcagaaattatatacgaaatattatacatgctgacaattaacgatctttataatatatcgtatccacctaccaaagtatagttgtatttttctcatgcgatgtgtgtaaaaaaactgatattatataaatattttagtgccgtataataaagatgacgatgaaaatgatggtacatatatatttcgtatcattattgttattgctattccacagttacgccatagacatcgaaaatgaaatcacagaattcttcaataaaatgagagatactctaccagctaaagactctaaatggttgaatccagcatgtatgttcggaggcacaatgaatgatatagccgctctaggagagccattcagcgcaaagtgtcctcctattgaagacagtcttttatcgcacagatataaagactatgtggttaaatgggagaggctagaaaagaatagacggcgacaggtttctaataaacgtgttaaacatggtgatttatggatagccaactatacatctaaattcagtaaccgtaggtatttgtgtaccgtaactacaaagaatggtgactgtgttcagggtatagttagatctcatattaaaaaacctccttcatgcattccaaaaacatatgaactaggtactcatgataagtatggcatagacttatactgtggaattctttacgcaaaacattataataatataacttggtataaagataataaggaaattaatatcgacgacattaagtattcacaaacgggaaagaaattaattattcataatccagagttagaagatagtggaagatacaactgttacgttcattacgacgacgttagaatcaagaatgatatcgtagtatcaagatgtaaaatacttacggttataccgtcgcaagaccacaggtttaaactaatactagatccaaaaatcaacgtaacgataggagaacctgccaatataacatgcactgctgtgtcaacgtcattattgattgacgatgtactgattgaatgggaaaatccatccggatggcttataggattcgattttgatgtatactctgttttaactagtagaggcggtattaccgaggcgaccttgtactttgaaaatgttactgaagaatatataggtaatacatataaatgtcgtggacacaactattattttgaaaaaacccttacaactacagtagtattggagtaaatacacaatgcatttttatatacattactgaataattattattattatttatatcgtatttgtgctataacgcgactatctaggtatttgtatctcactgatagagaacatataaatatagactctattaaacagttgtgtaaaatatcaaatcctaatagatgtggatgtacggctttacatgagtacttttataattatagatcagtcaacggaaaatacaagtatagatacaacggttactatcaatattatttatctagcgattatgaaaattataatgaatattattatgatgattatgatagaactggtatgaacagtgagagtgataatatatcaatcaaaacagaatatgaattctatgatgaaacacaagatcaaagtacacaactagtaggttacgacattaaactcaaaaccaatgaggatgattttatggctatgatagatcagtgggtgtccatgattatatagatgaatcaattaataaagtagtatatggaagagagtctcacgtaagatggcgggatatatggcaagaacataatgatggcgtatacagtataggaaaggagtgcatagataatatatacgaagacaaccataccgtagacgaattctacaagatagacagcgtatcagatgtagatgacgcggaacacatatctccgataactaatgatgtatctacacaaacatgggaaaagaaatcagagttagatagatacatggaaatgtatcctcgtcatagatatagtaagcattctgtctttaagggattttctgacaaagttagaaaaaatgatttagacatgaatgtggtaaaagaattactttctaacggtgcatctctaacaattaaggatagcagtaataaggatccaataaccgtttattttcgaagaacgataatgaatttagaaatgattgatattattaacaaacatacaactattgatgaacgaaagtatatagtacactcctatctaaaaaattataaaaatttcgattatccatttttcaggaagttagttttgactaataaacattgtctcaacaattattataatataagcgacagcaaatatggaacaccgctacatatattggcgtctaataaaaaattaataactcctaattacatgaagttattagtgtataacggaaatgatataaacgcacgaggtgaagatacacaaatgcgaactccattacacaaatatttgtgtaaatttgtatatcataatattgaatatggtatccgatactataatgaaaagattatagacgcatttatagagttaggagccgatctaactattccaaataacgatggaatgataccagtagtttactgtatacactcaaatgcagaatatggttataacaatattactaacataaagataatacgtaaactacttaatcttagtagacgtgcgtcacataatctatttagagatcgagtcatgcacgattatataagtaatacatatattgatcttgagtgtttagatattattagatcgttggatggattcgatatcaatggttactttgaaggacgtacaccacttcattgcgctatacaacataacttcactcagattgctaagtacttattagatcgaggagctgatatagtcgtacccaacacattgattatacatcagtacatacagtaaatagcatagatatggaggaggatacaaatatttcaaataaagttataaggtacaacactgtcaataatatatggaagacattacctaacttctggactggaactataaatccaggcgtggtctcgcataaagatgatatatatgttgtatgcgacatcaaagatgaaaaaaatgttaagacttgtatatttagatataacacgaatacgtataacggatgggaattggttacgacgacagaaagcagattatcagctctgcatactattcttcatgacaataccataatgatgttacattgttatgaatcgtatatgttacaagatacatttaatgtgtacactcgcgaatggaatcatatgtgtcatcaacattcgaatagttatatcatgtacaatatactacccatctactaaatataatagaataaaataaatgagtatgatcattttagataacgattgattttatcattaccgcttcattcttatattctttgcttacggaacctatatttagaaacatctactaacgattttttatgcttgcattattaatggtatgtaatatgattgattgtgtacgcaataccaatttgttaagtatgaatacggggtacaaacataaactgaaatttaacattatttatttatgatatatatcgttatcgttattgtttggtctataccatggatatctttaaagaactaatcttaaaacaccctgatgaaaatgttttgatttctccagtttctattttatctactttatctattctaaatcatggagcagctggttctacagctgaacaactatcaaaatatatagagaatatgaatgagaatacacccgatgataagaaggatgacaataatgacatggacgtagatattccgtattgtgcgacactagctaccgcaaataaaatatacggtagcgatagtatcgagttccacgcctccttcctacaaaaaataaaagacgattttcaaactgtaaactttaataatgctaaccaaacaaaggaactaatcaacgaatgggttaagacgatgacaaatggtaaaattaattccttattgactagtccgctatccattaatactcgtatgacagttgttagcgccgtccattttaaagcaatgtggaaatatccattttctaaacatcttacatatacagacaagttttatatttctaagaatatagttaccagtgttgatatgatggtgggtaccgagaataacttgcaatatgtacatattaatgaattattcggaggattctctattatcgatattccatacgagggaaactctagtatggtaattatactaccggacgacatagaaggtatatataacatagaaaaaaatataacagatgaaaaatttaaaaaatggtgtggtatgttatctactaaaagtatagacttgtatatgccaaagtttaaagtggaaatgacagaaccgtataatctggtaccgattttagaaaatttaggacttactaatatattcggatattatgcagattttagcaagatgtgtaatgaaactatcactgtagaaaaatttctacatacgacgtttatagatgttaatgaggagtatacagaagcatcggccgttacaggagtatttatgactaacttttcgatggtatatcgtacgaaggtctacataaaccatccattcatgtacatgattaaagacaacacaggacgtatactttttatagggaaatactgctatccgcaataaatataaacaaatagacttttatcacgtttatctatgtctaaatattacaaatagtaatagtataaactaaagctgataatacttaaaaaaataataatatcatttacaattaatagtataaactaaaaattaaacaaatcgttattataagtaatatcaaaatgatgatatacggattaatagcgtgtcttatattcgtgacttcatccatcgctagtccactttatattcccgttattccacccattacggaagataaatcgttcaatagtgtagaggtattagtttccttgtttagagatgaccaaaaagactatacggtaacttctcagttcaataactacactatcgataccaaagactggactatcggcgtactatccacacctgatggtttggatataccattgactaatataacttattggtcacggtttactataggtcgtgcattgttcaaatcagagtctgaggatattttccaaaagaaaatgagtattctaggtgtttctatagaatgtaagaagtcgtcgacattacttacttttttgaccgtgcgtaaaatgactcgagtatttaataaatttccagatatggcttattatcgaggagactgtttaaaagccgtttatgtaacaatgacttataaaaatactaaaactggagagactgattacacgtacctctctaatggggggttgcctgcatactatcgtaatggggtcgatggttgattattgattagtatattccttattcacacaaaaagaacatttttataaacatgaaaccactgtctaaatgtaattatgatcttgatttatagatgaagatcagcctttagaggattttaaccagtatgtttaatatgaaaaaaataaacataacatattttgagattaagcgctattgtgcttaattattttgctctataaactgaatatatagccacaattattgacgggcttgtttatgaccggcaatcatgaatttacagaaattatctctggctatatatcttactgcgacatgttcgtggtgttatgaaacatgcataagaaaaactgcgttgtatcatgacattcaattggagcatgtagaagacaataaagatagtgtagcgtcgctaccgtacaagtagtcaatcaaagagaacgtagtagattgttggctacatttaattggacagatatagctgagggtgttagaaatgagttcattaaaatatgtgatatcaacggaacatatttatataattatactattgctgttagtataattattgattccacggaagaactaccaacagttactccaattacaacaacatatgaaccttctacatataattatactatcgatgatagcactgttattactactgaagaactacaagtgactcctcatatggatctccatcgatgatacatgtattaaaatactttccgaataagtcttttaaatattgtattaattatgaaaaactatgctatgcgagtatgatgcaaagatgtttaatgatacgatactagattttatctctagcgagagatgtcgttagaatcatttatcataactacgtttaataataattcatcaacgaatatcgataacatgtgtcatttatacgttaaagtctgtccgtcttctctattgtttagactgtttgtagaatgctgtgatataaacaaactagtagaaggtacgactccgttacactgttatctaatgaatgaaggatttgaatcatctgttttaaaaaacctattaaaggagtatgtcatgaatacgtttaatgttcatgacatccattacacaaatatttaactcatgatgaagttgagaatgatatgctttctgatagtatagatagctttagctaatataaaaatatattaatccactatatattctagacttgatttaaaaccgataaactactactacgtactgtataagttgttaaaaaaaggagcagaccctaattatgtagatgatagaggtaatacttttcttcattacttctgcatctatatgtccacttatgagaaaacgtcatttaataagatgcatcgtgaaaagaaatttattaaagagttggtaaaatatgaaaccgaaagtaaataatataggaaatacacctctacataactacgtatctcaatatgatatcactctcattcctcatccacaacccattaaaaaaatggaaattaaagccctctattagcataaacggctacaggtctacctttacaatggcctctccttgtgcccagttcagaccctgtcattgccacgctactaaggactccctgaataccgtggccgacgtcagacattgtctgactgaatacatcctgtgggtttctcatagatggacccatagagaaagcgcagggtctctctacaggcttctcatctctttcagaactgatgcaacggagctctttggtggtgagttgaaggattcacttccgtgggacaatatcgacaattgcgtggagatcattaaatgtttcatcagaaatgactccatgaaaaccgccgaagaacttcgtgcaatcattggactttgtactcaatcagctatcgtctctggaagagtcttcaacgataagtatatcgacatactacttatgctgcgaaagattctgaacgagaacgactatctcaccctcttggatcatatccgcactgctaaatactaaatctccttcatgctctctcactacactttttatcatcttatgaggaatgattgccttcatcatttttcgtgaaataggaataattagcaccagaatagctatggattgcacatgtattctatgtcgtctactggatgaagatgtgacgtacaaaaaaataaaactagaaattgaaacgtgtcacaacttatcaaaacatatagatagacgaggaaacaatgcgctacattgttacgtcttcaataaatgcgatacagacattaagattgttcgactgttactctctcgcggagtcgagagactttgtagaaacaacgaaggattaactccgctaggagcatacagtaagcatagatacgtaaaatctcaaattgtgcatctactgatatccagctattcgaattcctctaacgaactcaagtcgaatataaatgatttcgatctgtattcgtatatgtcttcggataatatcgacttacgtctgctaaaatacctaattgtggataaacggatacgtccgtccaagaatacgaattatgcaatcaatggtctcggattggtggatatatacgtaacgacgcctaatccgagaccagaagtattgctatggcttcttaaatcagaatgttacagcaccggttacgtatttcgtacctgtatgtacgacagtgatatgtgtaagaactctcttcattactatatatcgtctcatagagaatctcaatctctatccaaggatgtaattaaatgtttgatcaataacaatgtttccatccatggcagagacgaaggaggatctttacccatccaatactactggtcttgctcaaccatagatatagagattgttaaattattaataaaggatgtggacacgtgtagagtatacgacgtcagccctatattagaggcggattatctaaacaagcgatttagagtaaccccatataatgtagacatggaaatcgttaatcttcttattgagagacgtcatactcttgtcgacgtaatgcgtagtattacttcttacgattccagagactataaccactacatcatcgataacattctaaagagatttagacaacaggatgaatccatcgtacaagccatgttgataaactacttacattacggcgatatggtcgttcgatgcatgttagataacggacaacaactatcctctgcacgactactttgttaataataatctcgtcgatgtaaacgtcgtaaggtttatcgtggaaaataatggacacatggctgtaaatcacgtatcgaacaatggccgtctatgtatgtacggtctgatattatcgagatttaataattgcgggtatcactgttatgaaaccatactaatagatgtatttgatatactaagcaagtacatggataatatagatatgatcgataatgagaataaaactctactatattacgcggtcgatgtcaataatatacaatttgcaaagcggttattggaatatggagcgagtgttacaacatcacgctcgataatcaatacggccatccagaaaagtagttacagaagagaaaacaaaacgaggatagttgatttattacttagctaccatcccactctagagactatgattgacgcatttaatagagatatacgctatctatatcctgaaccattattcgcctgtatcagatacgccttaatcctagatgatgattttccttctaaagtaagtatgatatctccggtcgtcataaggaactaaagcgctatagagtagacattaatagaatgaagaatgcctacatatcaggcgtctccatgtttgatatattatttaaacgaagcaaacgccacagattgagatacgcaaagaatccgacatcaaatggtacaaaaaagaactaacgtccatcattacagaaactgtaaagaacaatgagaggatcgactccatagtggacaacattaatacagacgataacttgatttcgaaattacccatggagatactttattactccattaaataatttatcatggagcgataatgtcctgtttcatttgtttccatgacatattacaaaatcgattccgtccaagatgataaaaacatttaccggcatcataaacacggagtttattttatatgtctcgcataaacattactaaaaaaatatattgttcggttttctttcacatctttaattatgaaaaagtaaatcattatgagatggacgagattgtacgcatcgttcgcgacagtatgtggtacatacctaacgtatttatggacgacggtaagaatgaaggtcacgtttctgtcaacaatgtttgtcatatgtattttacgttctttgatgtggatacatcgtctcatctgtttaagctagttattaaacactgcgatctgaataaacgaggtaactctccattacattgctatacgatgaatacacgatttaatccatctgtattaaagatattgttacaccacggcatgcgtaactttgatagcaaggatgaaaaaggacatattcctctacaccactatctgattcattcactatcaatcgataacaagatctttgatatactaacggacaccattgatgactttagtaaatcatccgatctattgctgtgttatcttagatataaattcaatgggagcttaaactattacgttctgtacaaaggatccgaccctaattgcgtcgacgaggatggactcacttctcttcattactactgtaaacacatatccacgttctacaaaagcaattattacaagttaagtcacactaagatgcgagccgagaagcgattcatctacgcgataatagattatggagcaaacattaacgcggttacacacttaccttcaacagtataccaaacatagtcctcgtgtggtgtatgctcttttatctcgaggagccgatacgaggatacgtaataatcttgattgtacacccatcatggaacgattgtgcaacaggtcatattctcataatgttactcaattggcacgaacaaaaggaagaaggacaacatctactttatctattcataaaacataatcaaggatacactctcaatatactacggtatctactagataggttcgacattcagaaagacgaatactataataccgcctttcaaaattgtaacaacaatgttgcctcatacatcggatacgacatcaaccttccgactaaagacggtattcgacttggtgtttgaaaacagaaacatcatatacaaggcggatgttgtgaatgacatcatccaccacagactgaaagtatctctacctatgattaaatcgttgttctacaagatgtcagaattctctccctacgacgattactacgtaaaaaagatactagcctactgcctattaagggacgagtcattcgcggaactacatagtaaattctgtttaaacgaggactataaaagtgtatttatgaaaaatatatcattcgataagatagattccatcatcgtgacataagtcgccttaaagagattcgaatctccgacaccgacctgtatacggtatcacagctatcttaaagccatacattcggacagacacatttcatttcccatgtacgacgatctcatagaacagtgccatctatcgatggagcataaaagtaaactcgtcgacaaagcactcaataaattagagtctaccatcggtcaatctagactatcgtatttgcctccggaaattatgcgcaatatcatctaaacagtatgttgtacggaaagaaccattacaaatattatccatgatagaaagaaaatatctatatgattggagaagtaggaaacaggaacaagacgacgattactacattattaaatcatgaagtccgtattatactcgtatatattgtttctctcatgtataataataaacggaagagatatagcaccgcatgcaccatccgatggaaagtgtaaagacaacgaatacaaacgccataatttgtgtccgggaacatacgcttccagattatgcgatagcaagactaacacacgatgtacaccctgtggttcgggtaccttcacatctcgcaataatcatttacccgcttgtctaagttgtaacggaagacgcgatcgtgtaacacgactcacaatagaatctgtgaatgctctcccggatattattgtcttctcaaaggatcatccggatgcaaggcatgtgtttcccaaacaaaatgtggaataggatacggagtatccggagacgtcatctgttctccgtgtggtctcggaacatattctcacaccgtctcttccgcagataaatgcgaacccgtacccagtaatacctttaactatatcgatgtggaaattaatctgtatcccgtcaacgacacgtcgtgtactcggacgaccactaccggtctcagtgaatccatctcaacgtcggaactaactattactatgaatcataaagactgtaatcccgtatttcgtgaggaatacttctctgtccttaataaggtagcaacttcaggtttctttacaggagaaaggtgtgcactctgaatttcgagattaaatgcaataacaaagattcttcctccaaacagttaacgaaagcaaagaatgatgacggtatcatgccgcattcggagacagtaactctagtgggcgactgtatatctagcgtcgacatctatatactatatagtaataccaatactcaagactacgaaactgatacaatctcttatcatgtgggtaatgttctcgatgtcgatagccatatgcccggtagttgcgatatacataaactgatcactaattccaaacccacccgctttttatagtaagtttttcacccataaataataaatacaataattaatttctcgtaaaagtagaaaatatattctaatttattgcatggtaaggaagtagaatcataaagaacagtactcaatcaatagcaattatgaaacaatatatcgtcctggcatgcatgtgcctgccagtcttcagcaatcatcctcatcctcatcctcgtgtacggaagaagaaaacaaacatcatatgggaatcgatgttattatcaaagtcacaaagcaagaccaaacaccgaccaatgataagatttgccaatccgtaacggaaattacagagtccgagtcagatccaaatcccgaggtggaatcagaagatgattccacatcagtcgaggatgtagatcctcctaccacttattactccatcatcggtggaggtctgagaatgaactttggattcaccaaatgtcctcagattaaatccatctcagaatccgctgatggaaacacagtgaatgctagattgtccagcgtgtccccaggacaaggtaaggactctcccgcgatcactcatgaagaagctcttgctatgatcaaagactgtgaggtgtctatcgacatcagatgtagcgaagaagagaaagacagcgacatcaagacccatccagtactcgggtctaacatctctcataagaaagtgagttacgaagatatcatcggttcaacgatcgtcgatacaaaatgtgtcaagaatctagagtttagcgttcgtatcggagacatgtgcaaggaatcatctgaacttgaggtcaaggatggattcaagtatgtcgacggatcggcatctgaaggtgcaaccgatgatacttcactcatcgattcaacaaaactcaaagcgtgtgtctgaatcgataactctattcatctgaaattggatgagtagggttaatcgaacgattcaggcacaccacgaattaaaaaagtgtaccggacactatattccggtttgcaaaacaaaaatgttcttaactacattcacaaaaagttacctctcgcgacttcttctttttctgtctcaatagtgtgatacgattatgacactattcctattcctattcctatttcctttcagggtatcacaaaaatattaaacctctttctgatggtctcataaaaaaagttttacaaaaatatttttattctctttctctctttgatggtctcataaaaaaagttttacaaaaatatttttattctctttctctctttgat

SEQ ID NO: 91 - DNA, 196026 bp, Vaccinia virus
  source 1..196026: mol_type = genomic DNA
  misc_feature 1..196026: note = VIR123
atcaaagagagaaagagaataaaaatatttttgtaaaactttttttatgagaccatcaaagagagaaagagaataaaaatatttttgtaaaactttttttatgagaccatcagaaagaggtttaatatttttgtgataccctgaaaggaaataggaataggaataggaatagtgtcataatcgtatcacactattgagacagaaaaagaagaagtcgcgagaggtaactttttgtgaatgtagttaagaacatttttgttttgcaaaccggaatatagtgtccggtacacttttttaattcgtggtgtgcctgaatcgttcgattaaccctactcatccaatttcagatgaatagagttatcgattcagacacacgctttgagttttgttgaatcgatgagtgaagtatcatcggttgcaccttcagatgccgatccgtcgacatacttgaatccatccttgacctcaagttcagatgattccttgcacatgtctccgatacgaacgctaaactctagattcttgacacattttgtatcgacgatcgttgaaccgatgatatcttcgtaactcactttcttatgagagatgttagacccgagtactggatgggtcttgatgtcgctgtctttctcttcttcgctacatctgatgtcgatagacacctcacagtctttgatcatagcaagagcttcttcatgagtgatcgcgggagagtccttaccttgtcctggggacacgctggacaatctagcattcactgtgtttccatcagcggattctgagatggatttaatctgaggacatttggtgaatccaaagttcattctcagacctccaccgatgatggagtaataagtggtaggaggatctacatcctcgactgatgtggaatcatcttctgattccacctcgggatttggatctgactcggactctgtaatttccgttacggattggcaaatcttatcattggtcggtgtttggtcttgctttgtgactttgataataacatcgattcccatatgatgtttgttttcttcttccgtacacgaggatgaggatgaggatgattgctgaagactggcaggcacatgcatgccaggacgatatattgtttcataattgctattgattgagtactgttctttatgattctacttccttaccatgcaataaattagaatatattttctacttttacgagaaattaattattgtatttattatttatgggtgaaaaacttactataaaaagcgggtgggtttggaattagtgatcagtttatgtatatcgcaactaccgggcatatggctatcgacatcgagaacattacccacatgataagagattgtatcagtttcgtagtcttgagtattggtattactatatagtatatagatgtcgacgctagatatacagtcgcccactagagttactgtctccgaatgcggcatgataccgtcatcattctttgctttcgttaactgtttggaggaagaatctttgttattgcatttaatctcgaaattcagagtgcacacctttctcctgtaaagaaacctgaagttgctaccttattaaggacagagaagtattcctcacgaaatacgggattacagtctttatgattcatagtaatagttagttccgacgttgagatggattcactgagaccggtagtggtcgtccgagtacacgacgtgtcgttgacgggatacagattaatttccacatcgatatagttaaaggtattactgggtacgggttcgcatttatctgcggaagagacggtgtgagaatatgttccgagaccacacggagaacagatgacgtctccggatactccgtatcctattccacattttgtttgggaaacacatgccttgcatccggatgatcctttgagaagacaataatatccgggagagcattcacagattctattgtgagtcgtgttacacgatcgcgtcttccgttacaacttagacaagcgggtaaatgattattgcgagatgtgaaggtacccgaaccacagggtgtacatcgtgtgttagtcttgctatcgcataatctggaagcgtatgttcccggacacaaattatggcgtttgtattcgttgtctttacactttccatcggatggtgcatgcggtgctatatctcttccgtttattattatacatgagagaaacaatatatacgagtataatacggacttcatgatttaataatgtagtaatcgtcgtcttgttcctgtttcctacttctccaatcatatagatattttctttctatcatggataatatttgtaatggttctttccgtacaacatactgtttagatgatattgcgcataatttccggaggcaaatacgatagtctagattgaccgatggtagactctaatttattgagtgctttgtcgacgagtttacttttatgctccatcgatagatggcactgttctatgagatcgtcgtacatgggaaatgaaatgtgtctgtccgaatgtatggctttaagatagctgtgataccgtatacaggtcggtgtcggagattcgaatctctttaaggcgacttatgtcacgatgatggaatctatcttatcgaatgatatatttttcataaatacacttttatagtcctcgtttaaacagaatttactatgtagttccgcgaatgactcgtcccttaataggcagtaggctagtatcttttttacgtagtaatcgtcgtagggagagaattctgacatcttgtagaacaacgatttaatcataggtagagatactttcagtctgtggtggatgatgtcattcacaacatccgccttgtatatgatgtttctgttttcaaacaccaagtcgaataccgtctttagtcggaaggttgatgtcgtatccgatgtatgaggcaacattgttgttacaattttgaaaggcggtattatagtattcgtctttctgaatgtcgaacctatctagtagataccgtagtatattgagagtgtatccttgattatgttttatgaatagataaagtagatgttgtccttcttccttttgttcgtgccaattgagtaacattatgagaatatgacctgttgcacaatcgttccatgatgggtgtacaatcaagattattacgtatcctcgtatcggctcctcgagataaaagagcatacaccacacgaggactatgtttggtatactgttgaaggtaagtgtgtaaccgcgttaatgtttgctccataatctattatcgcgtagatgaatcgcttctcggctcgcatcttagtgtgacttaacttgtaataattgcttttgtagaacgtggatatgtgtttacagtagtaatgaagagaagtgagtccatcctcgtcgacgcaattagggtcggatcctttgtacagaacgtaatagtttaagctcccattgaatttatatctaagataacacagcaatagatcggatgatttactaaagtcatcaatggtgtccgttagtatatcaaagatcttgttatcgattgatagtgaatgaatcagatagtggtgtagaggaatatgtcctttttcatccttgctatcaaagttacgcatgccgtggtgtaacaatatctttaatacagatggattaaatcgtgtattcatcgtatagcaatgtaatggagagttacctcgtttattcagatcgcagtgtttaataactagcttaaacagatgagacgatgtatccacatcaaagaacgtaaaatacatatgacaaacattgttgacagaaacgtgaccttcattcttaccgtcgtccataaatacgttaggtatgtaccacatactgtcgcgaacgatgcgtacaatctcgtccatctcataatgatttactttttcataattaaagatgtgaaagaaaaccgaacaatatatttttttagtaatgtttatgcgagacatataaaataaactccgtgtttatgatgccggtaaatgtttttatcatcttggacggaatcgattttgtaatatgtcatggaaacaaatgaaacaggacattatcgctccatgataaattatttaatggagtaataaagtatctccatgggtaatttcgaaatcaagttatcgtctgtattaatgttgtccactatggagtcgatcctctcattgttctttacagtttctgtaatgatggacgttagttcttttttgtaccatttgatgtcggattctttgcgtatctcaatctgtggcgtttgcttcgtttaaataatatatcaaacatggagacgcctgatatgtaggcattcttcattctattaatgtctactctatagcgctttagttccttatgacgaccggagatatcatacttactttagaaggaaaatcatcatctaggattaaggcgtatctgatacaggcgaataatggttcaggatatagatagcgtatatctctattaaatgcgtcaatcatagtctctagagtgggatggtagctaagtaataaatcaactatcctcgttttgttttctcttctgtaactacttttctggatggccgtattgattatcgagcgtgatgttgtaacactcgctccatattccaataaccgctttgcaaattgtatattattgacatcgaccgcgtaatatagtagagttttattctcattatcgatcatatctatattatccatgtacttgcttagtatatcaaatacatctattagtatggtttcataacagtgatacccgcaattattaaatctcgataatatcagaccgtacatacatagacggccattgttcgatacgtgatttacagccatgtgtccattattttccacgataaaccttacgacgtttacatcgacgagattattattaacaaagtagtcgtgcagaggatagttgttgtccgttatctaacatgcatcgaacgaccatatcgccgtaatgtaagtagtttatcaacatggcttgtacgatggattcatcctgttgtctaaatctctttagaatgttatcgatgatgtagtggttatagtctctggaatcgtaagaagtaatactacgcattacgtcgacaagagtatgacgtctctcaataagaagattaacgatttccatgtctacattatatggggttactctaaatcgcttgtttagataatccgcctctaatatagggctgacgtcgtatactctacacgtgtccacatcctttattaataatttaacaatctctatatctatggttgagcaagaccagtagtattggatgggtaaagatcctccttcgtctctgccatggatggaaacattgttattgatcaaacatttaattacatccttggatagagattgagattctctatgagacgatatatagtaatgaagagagttcttacacatatcactgtcgtacatacaggtacgaaatacgtaaccggtgctgtaacattctgatttaagaagccatagcaatacttctggtctcggattaggcgtcgttacgtatatatccaccaatccgagaccattgattgcataattcgtattcttggacggacgtatccgtttatccacaattaggtattttagcagacgtaagtcgatattatccgaagacatatacgaatacagatcgaaatcatttatattcgacttgagttcgttagaggaattcgaatagctggatatcagtagatgcacaatttgagattttacgtatctatgcttactgtatgctcctagcggagttaatccttcgttgtttctacaaagtctctcgactccgcgagagagtaacagtcgaacaatcttaatgtctgtatcgcatttattgaagacgtaacaatgtagcgcattgtttcctcgtctatctatatgttttgataagttgtgacacgtttcaatttctagttttatttttttgtacgtcacatcttcatccagtagacgacatagaatacatgtgcaatccatagctattctggtgctaattattcctatttcacgaaaaatgatgaaggcaatcattcctcataagatgataaaaagtgtagtgagagagcatgaaggagatttagtatttagcagtgcggatatgatccaagagggtgagatagtcgttctcgttcagaatctttcgcagcataagtagtatgtcgatatacttatcgttgaagactcttccagagacgatagctgattgagtacaaagtccaatgattgcacgaagttcttcggcggttttcatggagtcatttctgatgaaacatttaatgatctccacgcaattgtcgatattgtcccacggaagtgaatccttcaactcaccaccaaagagctccgttgcatcagttctgaaagagatgagaagcctgtagagagaccctgcgctttctctatgggtccatctatgagaaacccacaggatgtattcagtcagacaatgtctgacgtcggccacggtattcagggagtccttagtagcgtggcaatgacagggtctgaactgggcacaaggagaggccattgtaaaggtagacctgtagccgtttatgctaatagagggctttaatttccatttttttaatgggttgtggatgaggaatgagagtgatatcatattgagatacgtagttatgtagaggtgtatttcctatattatttactttcggtttcatattttaccaactctttaataaatttcttttcacgatgcatcttattaaatgacgttttctcataagtggacatatagatgcagaagtaatgaagaaaagtattacctctatcatctacataattagggtctgctcctttttttaacaacttatacagtacgtagtagtagtttatcggttttaaatcaagtctagaatatatagtggattaatatatttttatattagctaaagctatctatactatcagaaagcatatcattctcaacttcatcatgagttaaatatttgtgtaatggatgtcatgaacattaaacgtattcatgacatactcctttaataggttttttaaaacagatgattcaaatccttcattcattagataacagtgtaacggagtcgtaccttctactagtttgtttatatcacagcattctacaaacagtctaaacaatagagaagacggacagactttaacgtataaatgacacatgttatcgatattcgttgatgaattattattaaacgtagttatgataaatgattctaacgacatctctcgctagagataaaatctagtatcgtatcattaaacatctttgcatcatactcgcatagcatagtttttcataattaatacaatatttaaaagacttattcggaaagtattttaatacatgtatcatcgatggagatccatatgaggagtcacttgtagttcttcagtagtaataacagtgctatcatcgatagtataattatatgtagaaggttcatatgttgttgtaattggagtaactgttggtagttcttccgtggaatcaataattatactaacagcaatagtataattatataaatatgttccgttgatatcacatattttaatgaactcatttctaacaccctcagctatatctgtccaattaaatgtagccaacaatctactacgttctctttgattgactacttgtacggtagcgacgctacactatctttattgtcttctacatgctccaattgaatgtcatgatacaacgcagtttttcttatgcatgtttcataacaccacgaacatgtcgcagtaagatatatagccagagataatttctgtaaattcatgattgccggtcataaacaagcccgtcaataattgtggctatatattcagtttatagagcaaaataattaagcacaatagcgcttaatctcaaaatatgttatgtttatttttttcatattaaacatactggttaaaatcctctaaaggctgatcttcatctataaatcaagatcataattacatttagacagtggtttcatgtttataaaaatgttctttttgtgtgaataaggaatatactaatcaataatcaaccatcgaccccattacgatagtatgcaggcaaccccccattagagaggtacgtgtaatcagtctctccagttttagtatttttataagtcattgttacataaacggcttttaaacagtctcctcgataataagccatatctggaaatttattaaatactcgagtcattttacgcacggtcaaaaaagtaagtaatgtcgacgacttcttacattctatagaaacacctagaatactcattttcttttggaaaatatcctcagactctgatttgaacaatgcacgacctatagtaaaccgtgaccaataagttatattagtcaatggtatatccaaaccatcaggtgtggatagtacgccgatagtccagtctttggtatcgatagtgtagttattgaactgagaagttaccgtatagtctttttggtcatctctaaacaaggaaactaatacctctacactattgaacgatttatcttccgtaatgggtggaataacgggaatataaagtggactagcgatggatgaagtcacgaatataagacacgctattaatccgtatatcatcattttgatattacttataataacgatttgtttaatttttagtttatactattaattgtaaatgatattattatttttttaagtattatcagctttagtttatactattactatttgtaatatttagacatagataaacgtgataaaagtctatttgtttatatttattgcggatagcagtatttccctataaaaagtatacgtcctgtgttgtctttaatcatgtacatgaatggatggtttatgtagaccttcgtacgatataccatcgaaaagttagtcataaatactcctgtaacggccgatgcttctgtatactcctcattaacatctataaacgtcgtatgtagaaatttttctacagtgatagtttcattacacatcttgctaaaatctgcataatatccgaatatattagtaagtcctaaattttctaaaatcggtaccagattatacggttctgtcatttccactttaaactttggcatatacaagtctatacttttagtagataacataccacaccattttttaaatttttcatctgttatatttttttctatgttatatataccttctatgtcgtccggtagtataattaccatactagagtttccctcgtatggaatatcgataatagagaatcctccgaataattcattaatatgtacatattgcaagttattctcggtacccaccatcatatcaacactggtaactatattcttagaaatataaaacttgtctgtatatgtaagatgtttagaaaatggatatttccacattgctttaaaatggacggcgctaacaactgtcatacgagtattaatggatagcggactagtcaataaggaattaattttaccatttgtcatcgtcttaacccattcgttgattagttcctttgtttggttagcattattaaagtttacagtttgaaaatcgtcttttattttttgtaggaaggaggcgtggaactcgatactatcgctaccgtatattttatttgcggtagctagtgtcgcacaatacggaatatctacgtccatgtcattattgtcatccttcttatcatcgggtgtattctcattcatattctctatatattttgatagttgttcagctgtagaaccagctgctccatgatttagaatagataaagtagataaaatagaaactggagaaatcaaaacattttcatcagggtgttttaagattagttctttaaagatatccatggtatagaccaaacaataacgataacgatatatatcataaataaataatgttaaatttcagtttatgtttgtaccccgtattcatacttaacaaattggtattgcgtacacaatcaatcatattacataccattaataatgcaagcataaaaaatcgttagtagatgtttctaaatataggttccgtaagcaaagaatataagaatgaagcggtaatgataaaatcaatcgttatctaaaatgatcatactcatttattttattctattatattaacacatacatttttaacagcaacacattcaatattgtattgttatttttatattatttacacaattaacaatatattattagtttatattactgaattaataatataaaattcccaatcttgtcataaacacacactgagaaacagcataaacacaaaatccatcaaaaatgtcgatgaaatatctgatgttgttgttcgctgctatgataatcagatcattcgccgatagtggtaacgctatcgaaacgacattgccagaaattacaaacgctacaacagatattccagctatcagattatgcggtccagagggagatggatattgtttacacggtgactgtatccacgctagagatatcgacggtatgtattgtagatgctctcatggttatacaggcattagatgtcagcatgtagtattagtagactatcaacgttcagaaaaaccaaacactacaacgtcatatatcccatctcccggtattgtgcttgtattagtaggcattattattatgtgttgtctattatctgtttataggttcactcgaagaactaataaactacctctacaagatatggttgtgccataatttttataaatttttttatgagtatttttacaaaaaaaatgtataaagtgtatgtcttatgtatatttataaaaatgctaagtatgcgatgtatctatgttatttgtatttatctaaacaatacctctacctctagatattatacaaaaattttttatttcggcatattaaagtaaaatctagttaccttgaaaatgaatacagtgggtggttccgtatcaccagtaagaacataatagtcgaatacagtatccgattgagattttgcatacaatactagtctagaaagaaatttgtaatcattttctgtgacgggagtccatatatctgtatcatcgtctagtttatcagtgtcccatgctatatttctgttatcatcattagttaatgaaaataactctcgtgcttcagaaaagtcaaatattgtatccatacatacatctccaaaactatcgcttatacgtttatctttaacgatacctatacctagatggttatttactaacagacattttccagatctattgactataactcctatagtttccacatcaaccaagtaatgatcatctattgttatataacaataacataactcttttccatttttatcagtatgtatatctatatcaacgtcgtcgttgtagtgaatagtagtcattgatctattatatgaaacggatatgtctagaacggcaattgtcttacgtccagttaacactttcgttgatttaaagtctagagtctttgcaaacataatatccttatccgactttatatttcctgtagggtggtataattttattttgcctccacatatcggtgtttccaaatatattactagacaatattccatatagttattagttaagggtacccaattagaacacgtacgcttattatcatcatttggatcgtatttcataaaagttattgtactatcgatgtcaacacattctacattttttaatcgtctatatagtatttttctgatattttctataatatcagaattgtcttccatcggaagttgtatactatcggaatcagttacatgtttaaataattctctgatgtcattccttatacaatcaaattcattattaaacagtttaatagtctgtagacctttatcgtcgtaaatatccattgtcttattagttacgcttatttttatgtgttttacgttgctttattatattttataagaatgattgtttgacgaatcacgagaactattaagacacattattaggtatatattataaaaaagtttttgattacgatgttataagaggaaagaggacacattaacatcatacatcaattaactacattcttataacatcgtaatcaaaagaattgcaattttgatgtataacaactgtcaatgggttatggaattgtatattacatattatacggtatgttggtaacgacaaataccgatcggtaatcgtttgccggtgtaatagaattatatatatctatctattacaccggctgagtatacataataataagttgtggtagtatgatctccatatttataatttaggactttgtattcagtatttttggaatcataaaaaataaaaaaaagttttactaatttaaaatttaaaaagtatttacatttttttcactgtttagtcgcggatatggaattcgatcctgccaaaatcaatacatcatctatagatcatgtaacaatattacaatacatagatgaaccaaatgatataagactaacagtatgcattatccgaaatattaataacattacatattatatcaatatcacaaaaataaatacacatttggctaatcaatttcgggcttggaaaaaacgtatcgccggaagggactatatgactaacttatctagagatacaggaatacaacaatcaaaacttactgaaactatacgtaactgtcaaaaaaatagaaacatatatggtctatatatacactacaatttagttattaatgtggttattgattggataaccgatgtgattgttcaatcaatattaagagggttggtaaattggtacatagctaataatacctatactccaaatacacccaataatacaacaaccatttctgagttggatatcatcaaaatactaaataaatacgaggacgtgtatagagtaagtaaagaaaaagaatgtggaatttgctatgaagttgtttactcaaaacgattagaaaacgatagatactttggtttattggattcgtgtactcatatattttgcataacatgcatcaatatatggcataaaacacgaagagaaaccggtgcgtcggataattgtcctatatgtcgtacccgttttagaaacataacaatgagcaagttctataagctagttaactaataaataaaaagtttaatttgttgacgacgtatgtcgttattttttctcgtataaaagattaatttgattctaatataatctttagtattggataaatatcaattcaaattaattccattagattatatcataaataaaaatagtagcacgcactacttcagccaaatattcttttttgaaacgccatctatcgtagtgaggacacaagtgaacctataatgagcaaatttattagtatcggttacatgaaggactttacgtagagtggtgattccactatctgtggtacgaacggtttcatcttctttgatgccatcacccagatgttctataaacttggtatcctcgtccgatttcatatcctttgccaaccaatacatatagctaaactcaggcatatgttccacacatcctgaacaatgaaattctccagaagatgttacaatgtctagatttggacatttggtttcaaccgcgttaacatatgagtgaacacacccatacatgaaagcgatgagaaataggattttcatcttgccaaaatatcactagaaaaaatttatttatcaattttaaaggtataaaaaatacttattgttgctcgaatattttgtatttgatggtatacggaagattagaaatgtaggtattatcatcaactgattctatggttttatgtattctatcatgtttcactattgcgttggaaataatatcatatgcttccacatatattttattttgttttaactcataatactcacgtaattctggattattggcatatctgtgaataattttagctccatgatcagtaaatattaatgagaacatagtattaccacctaccattatttttttcatttcgttcaattcttgattgcaaagatctatataatcattatagcgttgacttatggactctggaatcttagacgatgtacagtcatctataatcatggcatatttaatacattgttttatagcatagtagttatctacgatgttagatatttctctcaatgaatcaatcacacaatctaatgtaggtttatgacataatagcattttcagcagttcaatgtttctagattcgttgatggcaatggctatacatgtatatccgttatttgatctaatgttgacatctgaaccggattctagcagtaaagatactagagattgtttattatatctaacagccttgtgaagaagtgtttctcctcgtttgtcaatcatgttaatgtctttaagataaggtaggcaaatgtttatagtactaagaattgggcaagcataagacatgtcacaaagaccctttttgtatgtataagtgtagaaattataacatccatagttggatttacataggtgtccaatcgggatctctccatcatcgagatgattgacggcatctcccccttccttttttagtagatatttcatcgtgtaagaatcaatattaatatttctaaagtatccgtgtatagcctctttatttaccacagctccatattccaacatgcattccactaaagggatatcgatatcgccgaatgtcatatactcaattagtatatgttggaggacatccgagttcattgttttcaatatcaaagagatggtttccttatcatttctccatagtggtacaatactacacattattccgtgaggctttccattctccaaaaacaatttgaccaaatctacatctttattgtatctataatcactatttagataatcagccataattcctcgagtgcaacatgttagatcgtctatatatgaataagccgtgttatctattcctttcattaacaatttaacgatgtctatatctatatgagatgacttaatataatattgaagagctgtacaatagtttttatctatagaagacggcttgattccgtgattaattagacatttaacaacttccggacgcacatatgctctcgtatccgactctgaatacagatgagagatgatatacagatgcaatacggtaccgcaatttcgtagttgataatcatcatacgcgtatccgtactcgtcctcataaagaacactgcagccattttctatgaacaaatcaataattttaggaacaggatcattgtcattacataattttctataactgaacgatggttttcacatttaacactcaagtcaaatccatgttctaccaacacctttatcaagtcaacgtctacatttttggatttcatatagctgaatatattaaagtcatttatgttgctaaatccagtggcttctagtagagccatcgctatatcctttaactttaacatgtctactatttgtgtattcttctaatggggtagctgtctccaatttttgcgtaatggattagtgccactgtctagtagtagtttgacgacctcgacattattacaatgctcattaaaaaggtatgcgtgtaaagcattattcttgaattggttcctggtatcattaggatctctgtctctcaacatctgtttaagttcatcgagagccacctcctcattttccaaatagtcaaacattttgactgaatagaagtgaatgagctactgtgaactctatacacccacacaactaatgtcattaaatattatttttttgaatgtatttataccatgtcaaaaacttgtacaattattaataaaaataatttagtgtttaaattttaccagttccagattttacacctccgttaaccccactttttacaccactggacgaccctcctccccacattccaccgccaccagatgtataagttttagatcctttattactaccatcatgtccatggataaagacactccacatgccgccactaccccctttagaagacatattaataagacttaagagttaaggacaagtttaacaataaaattaatcacgagtaccctactaccaacctacactattatatgattatagtttctatttttacagtaccttaactaaagtttctagtcacaagagcaatactaccaacctacactattatatgattatagtttctatttttataggaacgcgtacgagaaaatcaaatgtctaatttctaacggtagtgttgataaacgattatcgtcaatggatacctcctctatcatgtcgtctattttcttactttgttctattaacttattagcattatatattatttgattataaaacttatattgcttattagcccaatctgtaaatatcggattattaacatatcgtttctttgtaggtttatttaacttgtacatcactgtaagcatgtccgtaccatttattttaatttgacgcatatccgcaatttctttttcgcagtcggttataaattctatatatgatggatacatgctacatgtgtacttataatcgactaatatgaagtacttgatacatattttcagtaacgatttattattaccacctatgaataagtacctgtgatcgtctaggtaatcaactgttttcttaatacattcgatggttggtaatttactcagaataatttccaatatcttaatatataattctgctatttctggaatatatttatctgccagtataacacaaatagtaatacatgtaaacccatattttgttattatattaatgtctgcgccattatctattaaccattctactaggctgacactatgcgacttaatacaatgataaagtatactacatccatgtttatctattttgtttatatcatcaatatacggcttacaaagttttagtatcgataacacatccaactcacgcatagagaaggtagggaataatggcataatatttattaggttatcatcattgtcattatctacaactaagtttccattttttaaaatatactcgacaactttaggatctctattgccaaatttttgaaaatatttatttatatgcttaaatctatataatgtagctccttcatcaatcatacatttaataacattgatgtatactgtatgataagatacatattctaacaatagatcttgtatagaatctgtatatcttttaagaattgtggatattaggatattattacgtaaactattacacaattctaaaatataaaacgtatcacggtcgaataatagttgatcaactatataattatcgattttgtgatttttcttcctaaactgtttacgtaaatagttagatagaatattcattagttcatgaccactatagttactatcgaataacgcgtcaaatatttcccgtttaatatcgcatttgtcaagataataatagagtgtggtatgttcacgataagtataataacgcatctctttttcgtgtgaaattaaatagtttatcacgtccaaagatgtagcataaccatcttgtgacctagtaataatataataatagagaactgttttacccattctatcatcataatcagtggtgtagtcgtaatcgtaatcgtctaattcatcatcccaattataatattcaccagcacgtctaatctgttctattttgatcttgtatccatactgtatgttgctacatgtaggtattcctttatccaataatagtttaaacacatctacattgggatttgatgttgtagcgtatttctctacaatattaataccatttttgatactatttatttctatacctttcgaaattagtaatttcaataagtctatatcgatgttatcagaacatagatattcgaatatatcaaaatcattgatatttttatagtcgactgacgacaataacaaaatcacaacatcgtttttgatattattatttttcttggtaacgtatgcctttaatggagtttcaccatcatactcatataatggatttgcaccactttctatcaatgattgtgcactgctggcatcgatgttaaatgttttacaactatcatagagtatcttatcgttaaccatgattggttgttgatgctatcgcattttttggtttctttcatttcagttatgtatggatttagcacgtttgggaagcataagctcatatgatttcagtactgtagtgtcagtactattagtttcgatcagatcaatgtctagatctatagaatcaaaacacgataggtcagaagataatgaatatctgtaggcttcttgttgtactgtaacttctcgttttgttagatggttgcatcgtgctttaacatcaatggtacaaattttatcctcgctttgtgtatcatattcgtccctactataaaattgtatattcagattatcatgagatgtgtatacgctaacggtatcaataaacggagcacaccatttagtcataaccgtaatccaaaaatttttaaagtatatcttaacgaaagaagttgtgtcattgtctacggtgtatggtactagatcctcataagtgtatatatctagagtaatgtttaatttatcaaatggttgataatatggatcctcatggcaatttcctaagacgaaaataagacataaacacgcaataaatctaattgcggacatggttactccttaaaaaaatactaataatcaccttggctatttagtaagtgtcatttaacactatactcatattaatccatggactcataatctctatacgggattaacggatgttctatatacggggatgagtagttctcttctttaactttatactttttactaatcatatttagactgatgtatgggtaatagtgtttgaagagctcgttctcatcatcagaataaatcaatatctctgtttttttgttatacagatgtattacagcctcatatattacgtaatagaacgtgtcatctaccttattaactttcaccgcatagttgtttgcaaatacggttaatcctttgacctcgtcgatttccgaccaatctgggcgtataatgaatctaaactttaatttcttgtaatcattcgaaataatttttagtttgcatccgtagttatcccctttatgtaactgtaaatttctcaacgcgatatctccattaataatgatgtcgaattcgtgctgtatacccatactgaatggatgaacgaataccgacggcgttaatagtaatttactttttcatctttacatattgggtactagttttactatcataagtttataaattccacaagctactatggaataagccaaccatcttagtataacacacatgtcttaaagtttattaattaattacatgttgttttatatatcgctacgaatttaaacagagaaatcagtttaggaaaaaaaattatctatctacatcatcacgtctctgtattctacgatagagtgctactttaagatgagacatatccgtgtcatcaaaaatatactccattaaaatgattattccggcagcgaacttgatattggatatatcacaacctttgttaatatctacgacaatagacagcagtcccatggttccataaacagtgagtttatctttctttgaagagatattttgtagagatcttataaaactgtcgaatgacatcgcatttatatctttagctaaatcgtatatgttaccatcgtaatatctaaccgcgtctatcttaaacgtttccatcgctttaaagacgtttccgatagatggtctcatttcatcagtcatactgagccaacaaatataatcgtgtataacatctttgatagaatcagactctaaagaaaacgaatcggctttattatacgcattcatgataaacttaatgaaaaatgtttttcgttgtttaagttggatgaatagtatgtcttaataattgttattatttcattaattaatatttagtaacgagtacactctataaaaacgagaatgacataactaatcataactagttatcaaagtgtctaggacgcgtaattttcatatggtatagatcctgtaagcattgtctgtattctggagctattttctctatcgcattagtgagttcagaatatgttataaatttaaatcgaataacgaacataactttagtaaagtcgtctatattaactcttttattttctagccatcgtaataccatgtttaagatagtatattctctagttactacgatctcatcgttgtctagaatatcacatactgaatctacatccaattttagaaattggtctgtgttacatatctcttctatattattgttgatgtattgtcgtagaaaactattacgtagaccattttctttataaaacgaatatatagtactccaattatctttaccgatatatttgcacacataatccattctctcaatcactacatctttaagattttcgttgttaagatatttggctaaactatataattctattagatcatcaacagaatcagtatatatttttctagatccaaagacgaactctttggcgtcctctataatattcccagaaaagatattttcgtgttttagtttatcgagatctgatctgttcatatacgccatgattgtacggtacgttatgataaccgcataaaataaaaatccattttcatttttaaccaatactattcataattgagattgatgtaatactttgttactttgaacgtaaagacagtacacggatccgtatctccaacaagcacgtagtaatcaaatttggtgttgttaaacttcgcaatatttatcaatttagatagaaacttatactcatcatctgttttaggaatccatgtattattaccactttccaacttatcattatcccaggctatgtttcgtccatcatcgttgcgcagagtgaataattcttttgtattcggtagttcaaatatataatccatgcatagatcggtaaagctattgtagatgtgatttttcctaaatctaatataaaactcgtttactagcaaacactttcctgatttatcgaccaagacacatatggtttctaaatctatcaagtggtggggatccatagttatgacgcagtaacatagattattaccttcttaactgtcgctaatatctatatatttattgttatcgtattggattctgcatatagatggcttgtatgtcaaagatatagaacacataaccaatttatagtcgcgctttacattctcgaatctaaagttaagagatttagaaaacattatatcctcggatgatgttatcactgtttctggagtaggatatattaaagtctttacagatttcgtccgattcaaataaatcactaaataatatcccacattatcatctgttagagtagtatcattaaatctattatattttatgaaagatatatcactgctcacctctatatttcgtacatttttaaactgtttgtataatatctctctgatacaatcagatatatctattgtgtcggtagacgataccgttacatttgaattaatggtgttccattttacaacttttaacaagttgaccaattcatttctaatagtatcaaacgctccatgattaaatattttaatagtatccattttatatcactacggacacaaagtagctgacataaaccattgtataatttttatgttttatgtttattagcgtacacattttggaagttccggcttccatgtatttcctggagagcaagtagatgatgaggaaccagataggttatatccgtacttgcacttaaagtttacattgtcgttgtatgagtatgatcttttaaacccgctagacaagtatccgtttgatattgtaggatgtggacatttaacaatctgacacgtgggtggatcggaccattctcctcctgaacacaggacaccagagttaccaatcaacgaatatccactattgcaactataagttacaacgcttccatcggtataaaaatcctcgtatccgttatgtcttccgttggatatagatggaggggattggcatttaacagattcacaaataggtgcctcgggattccataccatagatccagtagatcctaattcacaatacgatttagattcaccgatcaaatgatatccgctattacaagagtacgttatactagagccaaagtctactccgccaatatcaagttggccattatcgatatctcgaggcgatgggcatctccgtttaatacattgattaaagagtgtccatccagtacctgtacatttagcatatataggtcccattttttgctttctgtatccaggtagacatagatattctatagtgtctcctatgttgtaattagcattagcatcagtctccacactattcttaaatttcatattaatgggtcgtgacggaatagtacagcatgatagaacgcatcctattcccaacaatgtcaggaacgtcacgctctccaccttcatatttatttatccgtaaaaatgttatcctggacatcgtacaaataataaaaagcccatatatgttcgctattgtagaaattgtttttcacagttgctcaaaaacgatggcagtgacttatgagttacgttacactttggagtctcatctttagtaaacatatcataatattcgatattacgagttgacatatcgaacaaattccaagtatttgattttggataatattcgtattttgcatctgctataattaagatataatcaccgcaagaacacacgaacatctttcctacatggttaaagtacatgtacaattctatccatttgtcttccttaactatatatttgtatagataattacgagtctcgtgagtaattccagtaattacatagatgtcgccgtcgtactctacagcataaactatactatgatgtctaggcatgggagacttttttatccaacgatttttagtgaaacattccacatcgtttaatactacatatttttcatacgtggtataaactccacccattacatatatatcatcgtttacgaataccgacgcgcctgaatatctaggagtaattaagtttggaagtcttatccatttcgaagtgccgtgtttcaaatattctgccacacccgttgaaatagaaaattctaatcctcctattacatataactttccattgttaacacaagtactaacttctgattttaacgacgacatattagtaaccgttttccattttttcgtttcaagatctacccgcgatacggaataaacatgtctattgttaatcatgccgccaataatgtatagacaattatgtaaaacatttgcattatagaattgtctatctgtattaccgactatcgtccaatattctgttctaggagagtaatgggttattgtggatatataatcagagtttttaatgactactatattatgttttataccatttcgtgtcactggctttgtagatttggatatagttaatcccaacaatgatatagcattgcgcatagtattagtcataaacttgggatgtaaaatgttgatgatatctacatcgtttggatttttatgtatccactttaataatatcatagctgtaacatcctcatgatttacgttaacgtcttcgtgggataagatagttgtcagttcatcctttgataattttccaaattctggatcggatgtcaccgcagtaatattgttgattatttctgacatcgacgcattatatagttttttaattccatatcttttagaaaagttaaacatccttatacaatttgtggaattaatattatgaatcatagtttttacacatagatctactacaggcggaacatcaattattatggcagcaactagtatcatttctacattgtttatggtgatgtttatcttcttccagcgcatatagtctaatagcgattcaaacgcgtgatagtttataccattcaatataatcgcttcatcctttagatggtgatcctgaatgcgtttaaaaaaattatacggagatgccgtaataatttccttattcacttgtataatttccccattgatagaaaatatcacgctttccattcttgaagtactataagtaattatagtataatgtaaaggtttatatattcaatattttttataaaaaaatcatttcgacattaattcctttttaaatttccgtctatcatctatagaaacatattctatgaatttataaaatgcttttacgtgtcctatcgtaggcgatagaaccgctaaaaagcctattgaatttctacaaaagaatctattatatggtatagggagagtataaaacattaaatgcccgtacttattaaagtattcagtagccaatcctaactctttcgaatacttattaatggctcttgttctgtacgaatctatttttttgaacaacggacctagtggtatatcttgttctatgtatctaaaataatgtctgactagatccgttagtttaatatcctcagtcatcttgtctagaatggcaaatctaactgcgggtttaggctttagtttagtttttatatctacatctatgtctttatctaacaccaaaaatataatagctaatattttattacaatcatccggatattcttctacgatctcactaactaatgtttctttggttatactagtatagtcactatcggacaaataaagaaaatcagatgatcgatgaataatacatttaaattcatcatctgtaagatttttgagatgtctcattaaaatattattagggtcagtactcattatcattaggcagctattacttattttattatttttcaccatatagatcaatcattagatcatcaaaatatgtttcaatcatcctaaagagtatggtgaatgactcttcccatctaatttctgaacgttcaccaatgtctctagccactttggcactaatagcgatcattcgcttagcgtcttctatattattaactggttgattcaatctatctagcaatggaccgtcggacagcgtcattctcatgttcttaatcaatgtacatacatcgccgtcatctaccaattcatccaacaacataagctttttaaaatcatcattataataggtttgatcgttgtcatttctccaaagaatatatctaataagtagagtcctcatgcttagtaatttaactattttagttaacaactattttttatgttaaatcaattagtacaccgctatgtttaatacttattcatattttagtttttaggattgagaatcaatacaaaaattaatgcatcattaattttagaaatacttagtttccacgtagttaatgaaacatttgaactcatcgtacaagacgttctcgtacaggacgtaactataaaccggtttatatttgttcaagatagatacaaatccgataactttttttacgaattctacgggatccactttaaaagtgtcataccgggttctttttatttttttaaacagatcaatggtgtgatgttgattaggtcttttacgaatttgatatagaatagcgtttacatattctccataatggtcaatcgccatttgttcgtatgtcataaattctttaattatatgacactgtgtattgtttagttcatccttgttcattgttaggaatctatccaaaatggcaattatactagaactataggtgcgttgtatacacatattgatgtgtctgtttatacaatccatgatatttggatccatgctactaccttcgggtaaaattgtagcatcatataccatttctagtactttaggttcattattatccattgcagaggacgtcatgatcgcatcctaaaaaaatatattatttttatgttattttgttaaaaataatcatcgaatacttcgtaagatactccttcatgaacataatcagttacaaaacgtttatatgaagtaaagtatctacgatttttacaaaagtccggatgcataagtacaaagtacgcgataaacggaataataatagatttatctagtctatctttttctatagctttcatagttagatacatggtctcagaagtaggattatgtaacatcagcttcgataaaatgactgggttatttagtcttacacattcgctcatacatgtatgaccgttaactacagagtctacactaaaatgattgaacaatagatagtctaccattgtttcgtattcagatagtacagcgtagtacatggcatcttcacaaattatatcattgtctaatagatatttgacgcatcttatggatcccacttcaacagccatcttaaaatcggtaaaatcatattgctttcctttatcattaataatttctaaaacatcatctctatcataaaagatacaaatattaactgtttgatccgtaataacattgctagtcgatagcaatttgttaataagatgcgctgggctcaatgtcttaataagaagtgtaagaggactatctccgaatttgttttgtttattaacatccgttgatggaagtaaaagatctataatgtctacattcttgactgttttagagcatacaatatggagaggtgtatttccatcatgatctggttttgagggactaattcctagtttcatcatccatgagattgtagaagcttttggattgtctgacataagatgtctatgaatatgatttttgccaaatttatccactatcctggcttcgaatccgatggacattatttttttaaacactctttctgaaggatctgtacacgccaacaacggaccacatccttcttcatcaaccgagttgttaatcttggctccatactgtaccaataaatttattctctctatgacttcatcatctgttcccgagagataatatagaggcgttttatgctgtttatcacacgcgtttggatctgcgccgtgcgtcagcagcatcgcgactattctattattattaattttagaagctatatgcaatggataatttccatcatcatccgtctcatttggagagtatcctctatgaagaagttcttcgacaaatcgttcatctagtcctttaattccacaatacgcatgtagaatgtgataattatttccagaaggttcgatagcttgtagcatattcctaaatacatctaaatttttactattatatttggcataaagagatagataatactcggccgacataatgttgtccattgtagtataaaaattaatatttctatttctatttctgtatatttgcaacaatttactctctataacaaatatcataacttagttcttttatgtcaagaaggcactggtttagttcatctataaatgtcacgccataactaccacgcatgctatactcagaattatgataaagatatttatccttggggtgtaggtaatggggattaatctttgttggatcagtctctaagttaacacatgtcacacatgatccatttatagttatatcacacgatgatgatttatgaattgattccggaagatcgctatcgtattttgtggttccacaattcatttccatacatgttattgtcacactaatattatgatgaactttatctagccgctgagtggtaaacaacagaacagatagtttattatctttaccaacaccctcagccgctgccacaaatctctgatccgtatccatgatggtcatgtttatttctagtccgtatccagtcaacactatgttagcatttctgtcgatatagctttcactcatatgacactcaccaataatagtagaattaatgtcgtaatttacaccaatagtgagttcggcggcaaagtaccaataccggtaatcttgtcgaggaggacatatagtattcttgtattctaccgaatacccgagagatgcgatacaaaagagcaagactaatttgtaaaccatcttactcaaaatatgtaacaatagtacgatgcaatgagtaagacaataggaaatctatcttatatacacataattattctatcaattttaccaattagttagtgtaatgttaacaaaaatgtgggagaatctaattagtttttctttacacaattgacgtacatgagtctgagttccttgtttttgctaattatttcatccaatttattattcttgactatatcgagatcttttgtataggagtcagacttgtattcaacatgcttttctataatcattttagctatttcggcatcatccaatagtacattttccagattagcagaatagatattaatgtcgtatttgaacagagcctgtaacatctcaatgtctttattatctatagccaatttaatgtccggaatgaagagaagggaattattggtgtttgtcgacgtcatatagtcgagcaagagaatcatcatatccacgtgtccattttttatagtggtgtgaatacaactaaggagaatagccagatcaaaagtagatggtatttctgaaagaaagtatgatacaatacttacatcattaagcatgacggcatgataaaatgaagttttccatccagttttcccatagaacatcagtctccaatttttcttaacaaacagttttaccgtttgcatgttaccactatcaaccgcataatacaatgcagtgtttcccttgtcatcaaattgtgaatcatccagtccactgaatagcaaaatctttactattttggtatcttccaatgtggctgcctgatgtaatggaaattcattctctagaagatttttcaatgctccagcgttcaacaacgtacatactagacgcacgttattatcagctattgcataatacaaggcactatgtccatggacatccgccttaaatgtatctttactagagagaaagcttttcagctgcttagacttccaagtattaattcgtgacagatccatgtctgaaacgagacgctaattagtgtatattttttcattttttataattttgtcatattgcaccagaattaataatatctctaatagatctgattagtagatacatggctatcgcaaaacaacatatacacatttaataaaaataatatttattaagaaaattcagatttcacgtacccatcaatataaataaaataatgattccttacaccgtacccatattaaggagattccaccttacccataaacaatataaatccagtaatatcatgtctaatgatgaacacaaatggtgtattaaattccagtttttcaggagatgatctcgccgtagctaccataatagtagatgcctctgctacagttccttgttcgtcgacatctatctttgcattctgaaacattttataaatatataatgggtccctagtcatatgtttaaacgacgcattatctggattaaacatactaggagccatcatttcggctatcgacttaatatccctcttattttcgatagaaaatttagggagtttaagattgtacactttattccctaattgaaacgaccaatagtctaattttgcagccgtaatagaatctgtgaaatgggtcatattatcacctattgccaggtacatactaatattagcatccttatacggaaggcgtaccatgtcatattctttgtcatcgattgtgattgtatttccttgcaatttagtaactacgttcatcatgggaaccgttttcgtaccgtacttattagtaaaactagcattgcgtgttttagtgatatcaaacggatattgccatgtacctttaaaatatatagtattaatgattgcccatagagtattattgtcgagcatattagaatctactacattagacataccggatctacgttctactatagaattaattttattaaccgcatctcgtctaaagtttaatctatataggccgaatctatgatattgttgataatacgacggtttaatacacacagtattatctacgaaactttgataagttagatcagtgtacgtatatttagatgttttcagcttagctaatcctgatattaattctgtaaatgctggacccagatctctttttctcaaatccatagtcttcaataattctattctagtattacctgatgcaggcaatagcgacataaacatagaaaacgaatagccaaacggcgagaagacaatattatcatcttgaatatttttatacgctactataccggcattggtaaatccttgcagacgataggtagacgctgaacacgttaacgatagtatcaataacgcaatcatgattttatggtattaataattaaccttatttttatgttcggtataaaaaaattattgatgtctacacatccttttgtaattgacatctatatatccttttgtataatcaactctaatcactttaacttttacagttttccctaccagtttatccctatattcaacatatctatccatatgcatcttaacactctctgccaagatagcttcagagtgaggatagtcaaaaagataaatatatagagcataatccttctcgtatactctgccctttattacatcgcccgcattgggcaacgaataacaaaatgcaagcatcttgttaacgggctcgtaaattgggataaaaattatgtttttatatctattttattcaagagaatattcaggaatttctttttccggttgtatctcgtcgcagtatatatcatttgtacattgtttcatattttttaatagtttacaccttttagtaggactagtatcgtacaattcatagctgtattttgaattccaatcacgcataaaaatatcttccaattgttgacgaagacctaatccatcatccggtgtaatattaatagatgctccacatgtatccgtaaagtaatttcctgtccaatttgaggtacctatataggccgttttatcggttaccatatatttggcatggtttaccctagaatacggaatgggaggatcagcatctggtacaataaatagctttacttctatatctatgtttttagattttagcatagcgatagatcttaaaaagtttctcatgataaacgaagatcgttgccagcaactaatcaatagcttaacggatacttgtctgtctatagcggatcttcttaattcatcttctatataaggccaaaacaaaattttacccgccttcgaataaataatagggataaagttcataacagatacataaacgaatttactcgcatttctaatacatgacaataaagcggttaaatcattggttctttccatagtacatagttgttgcggcgcagaagcaataaatacagagtgtggaacaccacttacgttaatactaagaggatgatctgtattataatacgacggataaaagtttttccaattatatggtagattgttaactccaagataccagtatacctcaaaaatttgagtgagatccgctgccaagttcctattattgaagatcgcaatacccaattctttgacctgagttagtgatctccaatccatgttagcgcttcctaaataaatatgtgtattatcagatatccaaaattttgtatgaagaactcctcctaggatatttgtaatatctatgtatcgtacttcaactccggccatttgtagtctttcaacatcctttaatggtttgttagatttattgacggctactctaactcttactcctcttttgggtaattgtacaatctcgtttaatattatcgtgccgaaattcgtacccacttcatccgataaactccaataaaaagatgatatatctagtgtttttgtggtattggatagaatttccctccacatgttaaatgtagacaaatatactttatcaaattgcatacctataggaatagtctctgtaatcactgcgattgtattatccggattcattttatttgttaaaaaataatcctatatcacttcactctattaaaaatccaagtttctatttctttcatgactgattttttaacttcatccgtttccttatgaagatgatgtttggcaccttcataaatttttatttctctattacaatttgcatgttgcatgaaataatatgcacctaaaacatcgctaatctcattgtttgttccctggagtatgagagtcgggggggtgttaatcttggaaattatttttctaaccttgttggtagccttcaagacctgactagcaaatccagccttaattttttcatgattgattaatgggtcgtattggtatttataaactttatccatatctctagatactgattctggacatagctttccgactggcgcatttggtgtgatggttcccataagtttggcagctagcagattcagttttgaaacagcatctgcattaactagaggagacattagaatcattgctgtaaacaagtttggattatcgtaagaggctagtatagaaattgttgctcccatggaatgacccaataagtagatttaatagttaccacgtgctgtaccaaagtcatcaatcatcattttttcaccattacttcttccatgtccaatatgatcatgtgagaatactaaaattcctaacgatgatatgttttcagctagttcgtcataacgtccagaatgtttaccagctccatgacttatgaatactaatgccttaggatatgtaataggtttccaatatttacaatatatgtaatcattgtccagattgaacatacagtttgcactcatgattcacgttatataactatcaatattaacagttcgtttgatgatcatattatttttatgttttattgataattgtaaaaacatacaattaaatcaatatagaggaaggagacggatactgtcttttgtgagatagtcatggcgactaaatcagattatgaggatgctgttttttactttgtggatgatgataaaatatgtagtcgcgactccatcatcgatctaatagatgaatatatcacgtggagaaatcatgttatagtgtttaacaaagatattaccagttgtggaagactgtacaaggaattgatgaagttcgatgatgccgctatacagtactatggtattgataaaattaatgagattgtcgaagctatgagcgaaggagaccactacatcaattttacaaaagtccatgatcaggaaagtttattcgctaccataggaatatgtgctaaaatcactgaacattggggatacaaaaagatttcagaatctagattccaatcattgggaaacattacagatctgatgaccgacgataatataaacatcttgatactttttctagaaaaaaaattgaattgatgatataggggtcttcataacgcataattattacgttagcattctatatccgtgttaaaaaaaattatcctatcatgtatttgagagttttatatgtagcaaacatgatagctgtgatgccaataagctttagatattcacgcgtgctagtgttagggatggtattatctggtggtgaaatgtccgttatataatctacaaaacaatcatcgcatatagtatgcgatagtagagtaaacatttttatcgtttctactgggttcatacatcgtctacccaattcggttatgaatgaaattgtcgccaatcttacacccaaacccttgttatccattagcatagtattaacttcgttatttatgtcataaactgtaaatgattctgtagatgccatatcatacatgatattcatgtccctattataatcattactaactttatcacaatatatgttgataatatctatatatgatctagtctttgtgggcaactgtctatacaagtcgtctaaacgttgtttactcatatagtatcgaacagccatcattacatggtcccgttccgttgatagataatcgagtatgttagtggacttgtcaaatctatataccatattttctggaagtggatatacatagtcgtgatcaacattattgctagcctcatcttctatatcctgtactataccattatctatatcatctacataatctacgatattattatacataaacatcgacaacatactattgtcaattatctaagtcctgttgatccaaacccttgatctcctctatctgtactatctagagattgtacttcttccagttctggataatatatacgttgatagattagctgggctattctatcccccgtatttacattaaacgtacattttccattattaataagaataactcctatgtttcccctataatcttcgtctattacaccgcctcctatatcaatgccttttagggacagaccagacctaggagctattctaccatagcagaacttaggcatggacatactaatatctgtcttaattaactgtcgttctccaggagggatagtataatcgtaagcgctatataaatcatatccggcggcgtaaggtgattgcctagtaggagatttagctctgttagtttccttaacaaatctaactggtgagttaatattcatgttgaacataaaactaatattttatttcaaaattatttaccatcccatatattccatgaataagtgtgatgattgtacacttctatagtatctatatacgattcacgataaaatcctcctatcaatagcagtttattatccactatgatcaattctggattatccctcggataaataggatcatctatcagagtccatgtattgctggattcacaataaaattccgcatttctaccaaccaagaataaccttctaccgaacactaacgcgcatgatttataatgaggataataagtggatggtccaaactgccactgatcatgattgggtagcaaatattctgtagttgtatcagtttcagaatgtcctcccattacgtatataacattgtttatagatgccactgctggattacatctaggtttcagaagactcggcatattaacccaagcagcatccccgtggaaccaacgctcaacagatgtgggatttggtagacctcctactacgtataatttattgttagcgggtatcccgctagcatacagtctggggctattcatcggaggaattggaatccaattgtttgatatataatttacagctatagcattgttatgtatttcattgttcatccatccaccgatgagatatactacttctccaacatgagtacttgtacacatatggaatatatctataatttgatccatgttcataggatactctatgaatggatacttgtatgatttgcgtggttgtttatcacaatgaaatattttggtacagtctagtatccattttacattatttatacctctgggagaaagataatttgacctgattacatttttgataaggagtagcagatttcctaatttatttcttcgctttatataccacttaatgacaaaatcaactacataatcctcatctggaacatttagttcatcgctttctagaataagtttcatagatagataatcaaaattgtctatgatgtcatcttccagttccaaaaagtgtttggcaataaagtttttagtatgacataagagattggatagtccgtattctatacccatcatgtaacactcgacacaatattcctttctaaaatctcgtaagataaagtttatacaagtgtagatgataaattctacagaggttaatatagaagcacgtaataaattgacgacgttatgactatctatatatacctttccagtatatgagtaaataactatagaagttaaactgtgaatgtcaaggtctagacaaacccttgtaactggatctttatttttcgtgtatttttgacgtaaatgtgtgcgaaagtaaggagataactttttcaatatcgtagaattgactattatattgccacctatagcatcaataattgttttgaatttcttagtcatagacaatgctaatatattcttacagtacacagtattaacaaatatcggcatttatgtttctttaaaagtcaacatctagagaaaaatgattatctttttgagacataactcccattttttggtattcacccacacgtttttcgaaaaaattagtttttccttccaatgatatattttccatgaaatcaaacggattggtaacattataaatttttttaaatcccaattcagaaatcaatctatccgcgacgaattctatatatgttttcatcatttcacaattcattcctataagtttaactggaagagccgcagtaagaaattcttgttcaatggatactgcatctgttataatagatctaacggtttcttcactcggtggatacaataaatgtttaaacatcaaacatgcgaagtcgcagtgtagaccctcgtctctactaattagttcgttggaaaacgtgagtccgggcattaggccacgctttttaagccaaaatatggaagcgaatgatccggaaaagaagattccttctactgcagcaaaggcaataagtctctctccataaccggcgctgtcatgtatccacttttgagcccaatcggccttcttttttacacaaggcattgtttctatggcattaaagagatagtttttttcattactatctttaacataagtatcgatcaaaagactatacatttccgaatgaatgttttcaatggccatctgaaatccgtagaaacatctagcctcggtaatctgtacttctgtacaaaatcgttccgccaaattttcattcactattccgtcactggctgcaaaaaacgccaatacatgttttataaaatatttttcgtctggtgttagtttattccaatcattgatatctttagatatatctacttcttccactgtccaaaatgatgcctctgcctttttatacatgttccagatgtcatgatattggattgggaaaataacaaatctatttggatttggtgcaaggatgggttccataactaaattaacaatatcaataaattttttttcagttatctatatgcctgtacttggattttttgtacatcgatatcgccgcaatcactacaataattacaagtattattgatagcattgttattagtactatcataattaaattatcgacattcatgggtgctgaataatcgttattatcatcattatcattttgtaattgtgacatcatactaaataaatcgtttgcgagattgttgtgggaagcgggcatggaggatgcattatcattattatttaacgccttccatttggattcacaaatatggcgcgcgttcaacattttatggaaactataattttgtgaaaacagataacaagaaaactcgtcatcgttcaaatttttaacgatagtaaaccgattaaacgtcgagctaatttctaacgctagcgactctgttggatatgggtttccagatatatatcttttcagttcccctacgtatctataatcatctgtaggaaatggaagatatttccatttatctactgttcctaatatcatatgtggtggtgtagtagaaccattaagcgcgaaagatgttatttcgcatcgtattttaacttcgcaataatttctggttagataacgcactctaccagtcaagtcaatgatattagcctttacagatatattcatagtagtcgtaacgatgactccatcttttagatgcgatactcctttgtatgtaccagaatcttcgtacctcaaactcgatatatttaaacaagttaatgagatattaacgcgttttatgaatgatgatatataaccagaagttttatcctcggtggctagcgctataaccttatcattataataccaactagtgtgattaatatgtgacacgtcagtgtgggtacaaatatgtacattatcgtctacgtcgtattcgatacatccgcatacagccaacaaatataaaatgacaaatactctaacgccgttcgtacccatcttgatgcggtttaataaatgttttgatttcaatttattgtaaaaaaagattcggttttatactgttcgatattctcattgcttatattctcatctatcatctccacacagtcaaatccgtggttagcatgcacctcatcaaccggtaaaagactatcggactcttctatcattataactctagaatatttaatttggtcattattaatcaagtcaattatcttatttttaacaaacgtgagtattttactcattttttataaaaacttttagaaatatacagactctatcgtgtgtctatatcttctttttatatccaatgtatttatgtctgatttttcttcatttatcatatataatggtccaaattctacacgtgcttcggattcatccagatcattaaggttcttataattgtaacatccttctcttccctcttctacatcttccttcttattcttattcttagcgtcacagaatctaccacagcaggatcccatgacgagcgtcatattaaactaatccattttcaattataatatatgattagtaatgaccattaaaataaaaaatattcttcataaccggcaagaaagtgaaaagttcacattgaaactatgtcagtagtatacatcatgaaatgatgatatatatatactctattttggtggaggattatatgatataattcgtggataatcattcttaagacacatttcttcattcgtaaatcttttcacgttaaatgagtgtccatattttgcaatttcttcatatgatggcggtgtacgtggacgaggctgctcctgttcttgttgtggtcgccgactgtcgtgtttgcgtttatccctccattatcgcgattgcgtagatggagtactattatataccttgtaattaaatttttttattaattaaacgtataaaaacgttccgtatctgtatttaagagccagatttcgtctaatagaacaaatagctacagtaaaaataactagaataattgctacacccactagaaaccacggatcgtaatacggcaatcggttttcgataataggtggaacgtatattttatttaaggacttaacaattgtctgtaaaccacaatttgcttccgcggatcctgtattaactatctgtaaaagcatatgttggccgggcggagccgaacattctccgatatccaatttctgtatatctataatattattaacctccgcatacgcattacagttcttttctagcttggataccgcactaggtacatcgtctagatctattcctatttcctcagcgatagctcttctatccttttccggaagcaatgaaatcacttcaataaatgattcaaccatgagtgtgaaactaagtcgagaattactcatgcatttgttagttattcggagcgcgcaatttttaaactgtcctataacctctcctatatgaatagcacaagtgacattagtagggatagaatgttgagctaatttttgtaaataactatctataaaaagattatacaaagttttaaactctttagtttccgccatttatccagtctgagaaaatgtctctcataataaatttttccaagaaactaattgggtgaagaatggaaacctttaatctatatttatcacagtctgttttggtacacatgatgaattcttctaatgccgtactaaattcgatatctttttcgatttctggatatgtttttaataaagtatgaacaaagaaatggaaatcgtaataccagttatgtttaactttgaaattgttttttattttcttgttaatgattccagccacttgggaaaagtcaaagtcgtttaatgccgatttaatacgttcattaaaaacaaactttttatcctttagatgaattattattggttcattggaatcaaaaagtaagatattatcgggtttaagatctgcgtgtaaaaagttgtcgcagcatggtagttcgtagattttaatgtataacagagccatctgtaaaaagataaactttatgtattgtaccaaagatttaaatcctaatttgatagctaactcggtatctactttatctgccgaatacagtgctaggggaaaaattataatgtttcctctttcgtattcgtagttagttctcttttcatgttcgaaaaagtgaaacatgcggttaaaatagtttataacattaatattactgttaataactgccgggtaaaagtgggatagtaatttcacgaatttgatactgtcctttctctcgttaaacgcctttagaaaaactttagaagaatatctcaatgatagttcctgaccatccatagtttgtatcaataatagcaacatatgaagaacacgtttatacagagtatgtaaaaatgttaatttatagtttaatcccatggcccacgcacacacgattaattttttttcatctccctttagattgttgtatagaaatttgggtactgtgaactccgccgtagtttccatgggactatataattttgtggcctcgaatacaaattttactacatagttatctatcttaaaaactataccatatcctcctgtagatatgtgataaaaatcgtcgtttataggataaaatcgtttatccttttgttggaaaaaggatgaattaatgtaatcattctcttctatctttagtagtgtttccttattaaaattcttaaaataatttaacaatctaactgacggagcccaattttggtgtaaatctaattgggacattatattgttaaaatacaaacagtctcctaatataacagtatctgataatctatggggagacatccattgatattcaggggatgaatcattggcaacacccatttattgtacaaaaagccccaatttacaaacgaaagtccaggtttgatagagacaaactattaactattttgtctctgtttttaacacctccacagtttttaatttctttagtaatgaaattattcacaatatcagtatcttctttatctaccagagattttactaacttgataaccttggctgtctcattcaatagggtagtaatatttgtatgtgtgatattgatatctttttgaattgtttcttttagaagtgattctttgatggtgccagcatacgaattacaataatgcagaaactcggttaacatgcaggaattatagtaagccaattccaattgttgcctgtgttgtattagagtgtcaatatgagcaatggtgtccttgcgtttctctgatagaatgcgagcagcgattttggcgttatcatttgacgatatttctggaatgacgaatcctgtttctactaactttttggtaggacaaagtgaaacaatcaagaagatagcttctcctcctatttgtggaagaaattgaactcctctagatgatctactgacgatagtatctccttgacagatattggaccgaattacagaagtacctggaatgtaaagccctgaaaccccctcattttttaagcagattgttgccgtaaatcctgcactgtgaccaagatagagagctcctttggtgaatccatctctatgtttcagtttaaccaagaaacagtcagctggtctaaaatttccatctctatctaatacagcatctaacttgatgtcaggaactatgaccggtttaatgttatatgtaacattgagtaaatccttaagttcataatcatcactgtcatcagttatgtacgatccaaacaatgtttctactggcatagtggatacgaagatgctatccatcagaatgtttccctgattagtattttctatatagctattcttctttaaacgattttccaaatcagtaactatgttcatttttttaggagtaggacgcctagccagtatggaagaggattttctagatcctctcttcaacatctttgatctcaatggaatgcaaaaccccatagtgaaacaaccaacgataaaaataatattgtttttcactttttataattttaccatctgactcatggattcattaatatctttataagagctactaacgtataattctttataactgaactgagatatatacaccggatctatggtttccataattgagtaaatgaatgctcggcaataactaatggcaaatgtataaaacaacgaaattatactagagttgttaaagttaatattttctatgagctgttccaataaattatttgttgtgactgcgttcaagtcataaatcatcttgatactatccagtaaacagtctttaagttctggaatattatcatcccattgtaaagcccctaattcgactatcgaatatcctgctctgatagcagtttcaatatcgacggacgtcaatactgtaataaaggtggtagtattgtcatcatcgtgataaactacgggaatatggtcgttagtaggtacggtgactttacacaacgcgatatataactttccttttgtaccatttttaacgtagttgggacgtcctgcagggtattgttttgaagaaatgatatcgagaacagatttgatacgatatttgttggattcctgattattcactataatataatctagacagatagatgattcgataaatagagaaggtatatcgttggtaggataatacatccccattccagtattctcggatactctattgatgacactagttaagaacatgtcttctattctagaaaacgaaaacatcctacatggactcattaaaacttctaacgctcctgattgtgtctcgaatgcctcgtacaaggatttcaaggatgccatagattctttgaccaacgatttagaattgcgtttagcatctgatttttttattaaatcgaatggtcggctctctggtttgctaccccaatgataacaatagtcttgtaaagataaaccgcaagaaaatttatacgcatccatccaaataaccctagcaccatcggatgatattaatgtattattatagattttccatccacaattattgggccagtatactgttagcaacggtatatcgaatagattactcatgtaacctactagaatgatagttcgtgtactagtcataatatctttaatccaatctaagaaatttaaaattagattttttacactgttaaagttaacaaaggtattacccggatacgtggatatcatatatggcattggtccattatcagtaatagctccataaactgatacggcgatggtttttatatgtgtttgatctaacgaggaagaaattcgcgcccacaattcatctctagatatgtatttaatatcaaacggtaacacatcaatttcgggacgcgtatatgtttctaaatttttaatccaaatataatgatgacctatatgccctattatcatactgtcaactatagtacacctagagaacttacgatacatctgtttcctataatcgttaaattttacaaatctataacatgctaaaccttttgacgacaaccattcattaatttctgatatggaatctgtattctcgataccgtattgttctaaagccagtgctatatctccctgttcgtgggaacgctttcgtataatatcgatcaacggataatctgaagtttttggagaataatatgactcatgatctatttcgtccataaacaatctagacataggaattggaggcgatgatcttaattttgtgcaatgagtcgtcaatcctataacttctaatattgtaatattcatcatcgacataacactatctatgttatcatcgtatattagtataccacggccttcttcatttcgtgccaaaataatatacagtcttaaataattacgcaatatctcaatagtttcataattgttagctgttttcatcaaggtttgtatcctgtttaacatgatggcgttctataacgtctctattttctatttttaattttttaaatttttaacgatttactgtggctagatacccaatctctctcaaatatttttttagcctcgcttacaagctgtttatctatactattaaaactgacgaatccgtgattttggtaatgggttccgtcgaaatttgccgaagtgatatgaacatattcgtcgtcgactatcaacaattttgtattattctgaatagtgaaaaccttcacagatagatcattttgaacacacaacgcgtctagacttctggcggttgccatagaatatacgtcgttcttatcccaattaccaactagaagtctgatcttaactcctctattaatggctgcttctataatggagttgtaaatgtcaggccaatagtagctattaccgtcgacacgtgtagtgggaactatggccaaatgttcaatatctatactagtcttagccgacttgagtttatcaataactacatcagtgtctagatctctagaatatcccaataggtgttctggagaatcagtaaagaacactccacctataggattcttaatatgatacgcagtgctaactggcagacaacaagccgcagagcataaattcaaccatgaattttttgcgctattaaaggctttaaaagtatcaaatcttctacgaagatctgtggccagcgggggataatcagaatatacacctaacgttttaatcgtatgtatagatcctccagtaaatgacgcgtttcctacataacatctttcatcatctgacacccaaaaacaaccgagtagtagtcccacattattttttttatctatattaacggttataaaatttatatccgggcagtgactttgtagctctcccagatttcttttccctcgttcatctagcaaaactattattttaatccctttttcagatgcctcttttagtttatcaaaaataagcgcgcccctagtcgtactcagaggattacaacaaaaagatgctatgtatatatatttcttagctagagtgataatttcgttaaaacattcaaatgttgttaaatgatcggatctaaaatccatattttctggtagtgtttctaccagcctacattttgctcccgcaggtaccggtgcaaatggccacatttagttaacataaaaacttatacatcctgttctatcaacgattctagaatatcatcggctatatcgctaaaattttcatcaaagtcgacatcacaacctaactcagtcaatatattaagaagttccatgatgtcatcttcgtttatttctatatccgtatccattgtagattgttgaccgattatcgagtttaaatcattactaatactcaatccttcagaatacaatctgtgtttcattgtaaatttataggcggtgtatttaagttggtagattttcaattatgtatcaatatagcaacagtagttcttgctcctccttgattctagcatcctcttcattattttcttctacgtacataagcatgtccaatacgttagacaacacaccgacgatggcggccgccacagacacgaatatgactagaccgatgaccatttaaaaacccctctctagctttcacttaaactgtatcgattattcttttagaacatgtataatataaaaacattattctatttcgaatttaggcttccaaaaatttttcatccgtaaaccgataataatatatatagacttgttaatagtcggaataaatagattaatgcttaaactatcatcatctccacgattagagatacaatatttacattctttttgctgtttcgaaactttatcaatacacgttaatacaaacccaggaaggagatattgaaactgaggctgttgaaaatgaaacggtgaatacaataattcagataatgtaaaatcatgattccgtattctgatgatattagaactgctaatggatgtcgatggtatgtatctaggagtatctattttaacaaagcatcgatttgctaatatacaattatcattttgattaattgttattttattcatattcttaaaaggtttcatatttatcaattcttctacattaaaaatttccatttttaatttatgtagccccgcaatactcctcattacgtttcattttttgtctataatatccattttgttcatctcggtacatagattatccaattgagaagcgcatttagtagttttgtacattttaagtttattgacgaatcgtcgaaaactagttatagttaacattttattatttgataccctgatattaatacccctgccgttactattatttataactgatgtaacccacgtaacattagaattaattatcgatagtaatgcatcgacgcttccaaaattgtctattataaactcaccgataatttttttattgcatgttttcatattcattaggattatcaaatctttaatcttattacgattgtatgcgttgatattacaagacgtcattctaaaagacggaggatctccatcaaatgccagacaatcacgtacaaagtacatggaaataggttttgttctattgcgcatcatagattcatatagaacacccatagaaatactaatttgttttactctataaaatactaatgcatctatttcatcgttttgtataacgtctttccaagtgccaaattccaaatttttttcattgatagtaccaaattcttctatctctttaactacttgcatagataggtaattacagtgatgcctacatgccgttttttgaaactgaatagatgcgtctagaagcgatgctacactagtcacaatcaccactttcatatttagaatatatgtatgtaaaaatatagtagaatttcattttgtttttttctatgctataaatgaattctcattttgcatctgctcatactccgttttatatcaataccaaagaaggaagatatctggttctaaaagccgttaaagtatgcgatgttagaactgtagaatgcgaaggaagtaaagcttcctgcgtactcaaagtagataaaccctcatcgcccgcgtgtgagagaagaccttcgtccccgtccagatgcgagagaatgaataaccctggaaaacaagtcccgtttatgaggacggacatgctacaaaatatgttcgcggctaatcgcgataatgtagcttctagacttttgtcctaaaatactattatatccttttcgatattaataaatccgtgtcgtccaggttttttatctctttcagtatgtgaatagataggtattttatctctattcatcatcgaatttaagagatccgataaacattgtttgtattctccagatgtcagcatctgatacaacaatatatgtgcacataaacctctggcacttatttcatgtaccttccccttatcactaaggagaatagtatttgagaaatatgtatacatgatattatcatgaattagatatacagaatttgtaacactctcgaaatcacacgatgtgtcggcgttaagatctaatatatcactcgataacacattttcatctagatacactagacattttttaaagctaaaatagtctttagtagtgacagtaactatgcgattattttcatcgatgatacatttcatcggcatattattacgcttaccatcaaagactataccatgtgtatatctaacgtattctagcatggttgccatacgtgcattaaacttttcaggatctttggatagatcttccaatctatctatttgagaaaacatttttatcatgttcaatagttgaaacgtcggatccactatatagatattatctataaagattttaggaactacgttcatggtatcctggcgaatattaaaactatcaatgatatgattatcgttttcatcttttatcaccatatagtttctaagatatgggattttacttaatataatattatttcccgtgataaattttattagaaaggccaaatctataagaaaagtcctagaattagtctgaagaatatctatatcgccgtaccgtatatttggattaattagatatagagaatatgatccgtaacatatacaacttttattatggcgtctaagatattcttccatcaacttattaacatttttgactagggaagatacattatgacgtcccattacttttgccttgtctattactgcgacgttcatagaatttagcatatctcttgccaattcttccattgatgttacattataagaaattttagatgaaattacatttggagctttaatagtaagaactcctaatatgtccgtgtatgtggtcactaatacagattgtagttctataatcgtaaataatttacctatattatatgtttgagtctgtttagaaaagtagctaagtatacgatcttttatttctgatgcagatgtatcaacatcggaaaaaaatctttttttattcttttttactaaagatacaaatatgtctttgttaaaaacagttattttctgaatatttctagcttgtaattttaacatatgatattcgttcacactaggtactctgcctaaataggtttctataatctttaatgtaatattaggaagagtattctgatcaggattcctattcattttgaggatttaaaactctgattattgtctaatatggtctcaacacaaactttttcacagagcgatagagtttttgataactcgtttttcttaagaaatataaaactactgtttccagagctcgctctatcttttattttatctaattcgatacaaactcctgatactggttcagaaagtaattcattaattttcagtcctttatagaagatatttaatatagataatacaaaattttcagttcttgatatcgatctgattgatcctagaactagatatattaataacgtgctcattaggcagtttatggcagcttgataattagatatagtatattccagttcatatttattagataccgcattgcccagattttgatattctatgaattcctctgaaaataaatccaaaataactagacattctattttttgtggattagtgtactctcttccctctatcatgttcactactggtgtccacgatgataaatatctagagggaatataatatagtccataggatgccaatctagcaatgtcgaataactgtaatttgattcttcgttcttcattatgaattgattcttgaggtataaacctaacacaaattatattattagacttttcgtatgtaatgtctttcatgttataagtttttaatcctggaatagaatctattttaatgaggcttttaaacgcagagttctccaacgagtcaaagcataatactctgttgtttttcttatatacgatgttacgattttcttctttgaatggaataggtttttgaattagtttataattacaacataatagataaggaagtgtgcaaatagtacgcggaaaaaacataatagctcccctgttttcatccatggttttaagtaaatgatcactggcttctttagtcaatggatattcgaacattaaccgtttcatcatcattggacagaatccatatttcttaatgtaaagagtgatcaaatcattgtgtttattgtaccatcttgttgtaaatgtgtattcggttatcggatctgctcctttttctattaaagtatcgatgtcgatctcgtctaagaattcaactatatcgacatatttcatttgtatacacataaccattactaacgtagaatgtataggaagagatgtaacgggaacagggtttgttgattcgcaaactattctaatacataattcttctgttaatacgtcttgcacgtaatctattatagatgccaagatatctatataattattttgtaagatgatgttaactatgtgatctatataagtagtgtaataattcatgtatttcgatatatgttccaactctgtctttgtgatgtctagtttcgtaatatctatagcatcctcaaaaaatatattcgcatatattcccaagtcttcagttctatcttctaaaaaatcttcaacgtatggaatataataatctattttacctcttctgatatcattaatgatatagtttttgacactatcttctgtcaattgattcttattcactatatctaagaaacggatagcgtccctaggacgaactactgccattaatatctctattatagcttctggacataattcatctattataccagaattaatgggaactattccgtatctatctaacatagttttaagaaagtcagaatctaagacctgatgttcatatattggttcatacatgaaatgatctctattgatgatagtgactatttcattctctgaaaattggtaactcattctatatatgctttccttgttgatgaaggatagaatatactcaatagaatttgtaccaacaaactgttctcttatgaatcgtatatcatcatctgaaataatcatgtaaggcatacatttaacaattagagacttgtctcctgttatcaatatactattcttgtgataatttatgtgtgaggcaaatttgtccacgttctttaattttgttatagtagatatcaaatccaatggagctacagttcttggcttaaacagatatagtttttctggaacgaattctacaacattattataaaggactttgggtagataagtgggatgaaatcctattttaattaatgcgatagccttgtcctcgtgcagatatccaaacgcttttgtgatagtatggcattcattgtctagaaacgctctacgaatatctgtgacagatatcatctttagagaatatactagtcgcgttaatagtactacaatttgtattttttaatctatctcaataaaaaaattaatatgtatgattcaatgtataactaaactactaactgttattgataactagaatcagaatctaatgatgacgtaaccaagaagtttatctactgccaatttagctgcattatttttagcatctcgtttagattttccatctgccttatcgaatactcttccgtcgatgtctacacaggcataaaatgtaggagagttactaggccccactgattcaatacgaaaagaccaatctctcctagtaatttggcagtactcattaataacggtgacagggttagcacctttccaatcaataatttttttagccggaataacatcatcaaaagacttatgatcctctctcattgatttttcgcgggatacatcatctattatggcgtcagccataacatcagcatccggcttatccgcctccgttgtcataaaccaacgaggaggaatatcgtcggagctgtacaccatagcactacgttgaagatcgtacagagctttattaacttctcgcttctccatattaagttgtctagttagttgtgcagcagtagctccttcgattccaatggttttaatagcctcacacacaatctctgcgttagaacgttcgtcgatatagattttagacatttttagagagaactaacacaaccagcaataaaactgaacctactttatcatttttttattcatcatcctctggtggttcgtcgttcctatcgaatgtggatctgattaacccgtcatctataggtgatgctggttctggagattctggaggagatggattattatctggaagaatctctgttatttccttgttttcatgtatcgattgcgttgtaacattaagattgcgaaatgctctaaatttgggaggcttaaagtgttgtttgcaatctctacacgcatgtctaactagtggaggttcgtcagcggctctagtttgaatcatcatcggcgtagtattcctacttttacagttaggacacggtgtattgtatttctcgtcgagaacgttaaaataatcgttgtaactcacatcctttattttatctatattgtattctactcctttcttaatgcattttataccgaataagagatagcgaaggaattctttttcggtgccgctagtacccttaatcatatcacatagtgttttatattccaaatttgtggcaatagacggtttatttctatacgatagtttgtttctggaatcctttgagtattctataccaatattattctttgattcgaatttagtttcttcgatattagattttgtattacctatattcttgatgtagtactttgatgatttttccatggcccattctattaagtcttccaagttggcatcatccacatattgtgatagtaattctcggatatcagtagcggctaccgccattgatgtttgttcattggatgagtaactactaatgtatacattttccatttataacacttatgtattaactttgttcatttatattttttcattattatgttgatattaacaaaagtgaatatatatgttaataattgtattgtggttatacggctacaatttcataatgagtggaagtcagtgtccgatgatcaatgacgatagctttactctgaaaagaaagtatcaaatcgatagtgcggagtcaacaataaaaatggataagaagaggataaagtttcagaatagagccaaaatggtaaaagaaataaatcagacaataagagcagcacaaactcattacgagacattgaaactaggatacataaaatttaagagaatgattaggactactactctagaagatatagcaccatctattccaaataatcagaaaacttataaactattctcggacatttcagccatcggcaaagcatcacagaatccgagtaagatggtatatgctctgctgctttacatgtttcccaatttgtttggagatgaccatagattcattcgttatagaatgcatccaatgagtaaaatcaaacacaagatcttctctcctttcaaacttaatcttattagaatattagtggaagaaagattctataataatgaatgcagatctaataaatggagaataattggaacacaagttgataaaatgttgatagctgaatctgataaatatacaatagatgcaaggtataacctaaaacccatgtatagaatcaagggaaaatctgaagaagataccctcttcatcaaacagatggtagaacaatgtgtgacatcccaggaattggtggaaaaagtgttgaagatactgtttagagatttgttcaagagtggagaatacaaagcatacagatacgatgatgatgtagaaaatggatttattggattggatacactaaaattaaacattgttcatgatatagttgaaccatgtatgcctgttcgtaggccagtggctaagatactgtgtaaagaaatggtaaataaatactttgagaatccgctacatattattggtaaaaatcttcaagagtgcattgactttgttagtgaataggcatttcatctttctccaatactaattcaaattgttaaattaataatggatagtataaatagttattagtgataaaatagtaaaaataattattagaataagagtgtagtatcatagataactctcttctataaaaatggattttattcgtagaaagtatcttatatacacagtagaaaataatatagattttttaaaggatgatacattaagtaaagtaaacaattttaccctcaatcatgtactagctctcaagtatctagttagcaattttcctcaacacgttattactaaggatgtattagctaataccaatttttttgttttcatacatatggtacgatgttgtaaagtgtacgaagcggttttacgacacgcatttgatgcacccacgttgtacgttaaagcattgactaagaattatttatcgtttagtaacgcaatacaatcgtacaaggaaaccgtgcataaactaacacaagatgaaaaatttttagaggttgccgaatacatggacgaattaggagaacttataggcgtaaattatgacttagttcttaatccattatttcacggaggggaacccatcaaagatatggaaatcatttttttaaaactgtttaagaaaacagacttcaaagttgttaaaaaattaagtgttataagattacttatttgggcatacctaagcaagaaagatacaggcatagagtttgcggataatgatagacaagatatatatactctatttcaacaaactggtagaatcgtccatagcaatctaacagaaacgtttagagattatatctttcccggagataagactagctattgggtgtggttaaacgaaagtatagctaatgatgcggatatcgttcttaatagacacgccattaccatgtatgataaaattcttagttatatatactctgagataaaacaaggacgcgttaataaaaacatgcttaagttagtttatatctttgagcctgaaaaagatatcagagaacttctgctagaaatcatatatgatattcctggagatatcctatctattattgatgcaaaaaacgacgattggaaaaaatattttattagtttttataaagctaattttattaacggtaatacatttattagtgatagaacgtttaacgaggacttattcagagttgttgttcaaatagatcccgaatatttcgataatgaacgaattatgtctttattctctacgagtgctgcggacattaaacgatttgatgagttagatattaataacagttatatatctaatataatttatgaggtgaacgatatcacattagatacaatggatgatatgaagaagtgtcaaatctttaacgaggatacgtcgtattatgttaaggaatacaatacatacctgtttttgcacgagtcggatcccatggtcatagagaacggaatactaaagaaactgtcatctataaaatccaagagtagacggctgaacttgtttagcaaaaacattttaaaatattatttagacggacaattggctcgtctaggtcttgtgttagatgattataaaggagacttgttagttaaaatgataaaccatcttaagtctgtggaggatgtatccgcattcgttcgattttctacagataaaaaccctagtattcttccatcgctaatcaaaactattttagctagttataatatttccatcatcgtcttatttcaaaggtttttgagagataatctatatcatgtagaagaattcttggataaaagcatccatctaaccaagacggataagaaatatatacttcaattgataagacacggtagatcatagaacagaccaaatatattattaataatttgtatatacatagatataattatcacatattaaaaattcacacatttttgataaatgggaactgctgcaacaattcagactcccaccaaattaatgaataaagaaaatgcagaaatgattttggaaaaaattgttgatcatatagttatgtatattagtgacgaatcaagtgattcagaaaataatcctgaatatattgattttcgtaacagatacgaagactatagatctctcattataaaaagtgatcacgagtttgtaaagctatgtaaaaatcatgcagagaaaagttctccagaaacgcaacaaatgattatcaaacacatatacgaacaatatcttattccagtatctgaagtactattaaaacctataatgtccatgggtgacataattacatataacggatgtaaagacaatgaatggatgctagaacaactctctaccctaaactttaacaatctccgcacatggaactcatgtagcataggcaatgtaacgcgtctgttttatacattttttagttatctgatgaaagataaactaaatatataagtataatcccattctaatactttaacctgatgtattacctgcatcttattagaatattaacctaactaaaagacataacataaaaactcattacatagttgataaaaagcggtaggatataaatattatggctgccaccgttccgcgttttgacgacgtgtacaaaaatgcacaaagaagaattctagatcaagaaacattttttagtagaggtctaagtagaccgttaatgaaaaacacatatctatttgataattacgcgtatggatggataccagaaactgcaatttggagtagtagatacgcaaacttagatgcaagtgactattatcccatttcgttgggattacttaaaaagttcgagtttctcatgtctctatataaaggtcctattccagtatacgaagaaaaagtaaatactgaattcatagccaatggatcgttctctggtagatacgtatcatatcttcgaaagttttctgctcttccaacaaacgagtttattagttttttgttactgacttccattccaatctataatatcttgttctggtttaaaaatactcagtttgatattactaaacacacattattcagatacgtctatacagataatgccaaacacctggcgttggctaggtatatgcatcaaacaggagactataagcctttgtttagtcgtctcaaagagaattatatatttaccggtcccgttccaataggtatcaaagatatagatcaccctaatcttagtagagcaagaagtccatccgattatgagacattagctaatattagtactatattgtactttaccaagtatgatccggtattaatgtttttattgttttacgtacctgggtattcaattactacaaaaattactccagccgtagaatatctaatggataaactgaatctaacaaagagcgacgtacaactgttgtaaattattttatgcttcgtaaaatgtaggttttgaaccaaacattctttcaaagaatgagatgcataaaactttattatccaatagattgactatttcggacgtcaatcgtttaaagtaaacttcgtaaaatattctttgatcactgccgagtttaaaacttctatcgataattgtctcatatgttttaatatttacaagttttttggtccatggtacattagccggacaaatatatgcaaaataatatcgttctccaagttctatagtttctggattatttttattatattcagtaaccaaatacatattagggttatctgcggatttataatttgagtgatgcattcgactcaacataaataattctagaggagacgatctactatcaaattcggatcgtaaatctgtttctaaagaacggagaatatctatacatacctgattagaattcatccgtccttcagacaacatctcagacagtctggttttgtacatcttaatcatattcttatgaaacttggaaacatctcttctagtttcactagtacctttattaattctctcaggtacagattttgaattcgacgatgccgagtatttcatcgttgtatatttcttcttcgattgcataatcagattcttatataccgcctcaaactctattttaaaattattaaacaatactctactattaatcagtcgttctaactctttcgctatttctatagacttatctacatcttgactgtctatctctgtaaacacggagtcggtatctccatacacgctacgaaaacgaaatctgtaatctataggcaacgatgttttcacaatcggattaatatctctatcgtccatataaaatggattacttaatggattggcaaaccgtaacataccgttagataactctgctccatttagtaccgattctagatacaagatcattctacgtcctatggatgtgcaactcttagccgaagcgtatgagtatagagcactatttctaaatcccatcagaccatatactgagttggctactatcttgtacgtatattgcatggaatcataaatggccttttcagttgaactggtagcctgttttaacatctttttatatctggctctctctgccaaaaatgttcttaatagtctaggaatggttccttctatcgatctatcgaaaattgctatttcagagatgaggttcggtagtctaggttcacaatgaaccgtaatatatctaggaggtggatatttctgaagcaatagctgattatttatttcttcttccaatctattggtactaacaacgacaccgactaatgtttccggagatagatttccaaagatacacacattaggatacagactgttataatcaaagattaatacattattactaaacattttttgttttggagcaaataccttaccgccttcataaggaaacttttgttttgtttctgatctaactaagatagttttagtttccaacaatagctttaacagtggacccttgatgactgtactcgctctatattcgaataccatggattgaggaagcacatatgttgacgcacccgcgtctgtttttgtttctactccataatactcccacaaatactgacacaaacaagcatcatgaatacagtatctagccatatctaaagctatgtttagattataatccttatacatctgagctaaatcaacgtcatcctttccgaaagataatttatatgtatcattaggtaaagtaggacataatagtacgactttaaatccattttcccaaatatctttacgaattactttacatataatatcctcatcaacagtcacataattacctgtggttaaaacctttgcaaatgcagcggctttgcctttcgcgtccgtagtatcgtcaccgatgaacgtcatttctctaactcctctatttaatactttacccatgcaactgaacgcgttcttggatatagaatccaatttgtacgaatccaatttttcagatttttgaatgaatgaatatagatcgaaaaatatagttccattattgttattaacgtgaaacgtagtattggccatgccgcctactcccttatgactagactgatttctctcataaatacagagatgtacagcttcctttttgtccggagatctaaagataatcttctctcctgttaataactctagacgattagtaatatatctcagatcaaagttatgtccgttaaaggtaacgacgtagtcgaacgttagttccaacaattgtttagctattcgtaacaaaactatttcagaacatagaactagttctcgttcgtaatccatttccattagtgactgtatcctcaaacatcctctatcgacggcttcttgtatttcctgttccgttaacatctcttcattaatgagcgtaaacaataatcgtttaccacttaaatcgatataacagtaacttgtatgcgagattgggttaataaatacagaaggaaacttcttatcgaagtgacactctatatctagaaataagtacgatcttgggatatcgaatctaggtatttttttagcgaaacagttacgtggatcgtcacaatgataacatccattgttaatctttgtcaaatattgctcgtccaacgagtaacatccgtctggagatatcccgttagaaatataaaaccaactaatattgagaaattcatccatggtggcattttgtatgctgcgtttctttggctcttctatcaaccacatatctgcgacggagcattttctatctttaatatctagattataacttattgtctcgtcaatgtctatagttctcatctttcccaacggcctcgcattaaatggaggaggagacaatgactgatatatttcgtccgtcactacgtaataaaagtaatgaggaaatcgtataaatacggtctcaccatttcgacatctggatttcagatataaaaatctgttttcaccgtgactttcaaaccaattaatgcaccgaacatccatttatagaatttagaaatatattttcatttaaatgaatcccaaacattggggaagagccgtatggaccattatttttatagtactttcgcaagcgggtttagacggcaacatagaagcgtgtaaacgaaaactatatactatagtcagcactcttccatgtcctgcatgtagacggcacgcgactatcgctatagaggacaataatgtcatgtctagcgatgatctgaattatatttattattttttcatcagattatttaacaatttggcatctgatcccaaatacgcgatcgatgtgacaaaggttaaccctttataaacttaacccattataaaacttatgattagtcacaactgaaataaccgcgtgattattttttggtataattctacacggcatggtttctgtaactatgaattcaacccccgttacattagtgaaatctttaacaaacagcaagggttcgtcaaagacataaaactcattgtttacaatcgaaatagaccccctatcacacttaaaataaaaaatatccttatcctttaccaccaaataaaattctgattggtcaatgtgaatgtattcacttaacagttccacaaatttatttattaactccgaggcacatacatcgtcggtattttttatggcaaactttactcttccagcatccgtttctaaaaaaatattaacgagttccatttatatcatccaatattattgaaatgacgttgatggacagatgatacaaataagaaggtacggtacctttgtccaccatctcctccaattcatgctctattttgtcattaactttaatgtatgaaaacagtacgccacatgcttccatgacagtgtgtaacactttggatacaaaatgtttgacattagtataattgttcaagactgtcaatctataatagatagtagctataatatattctatgatggtattgaagaagatgacaaccttggcatattgatcatttaacacagacatggtatcaacagatagcttgaatgaaagagaatcagtaattggaataagcgtcttctcgatagagtgtccgtataccaacatgtctgatattttgatgtattccattaaattatttagttttttctttttattttcgttaaacagcatttctgtcaacggaccccaacatcgttgaccgattaagttttgattgatttttccgtgtaatgcgtatctagtcagatcgtatagcctatccaataatccatcatctgtgcgtagatcacatcgtacactttttaattctctatagaagagcgacagacatctggagcaattacagacagcaatttctttattctctacagatgtaagatacttgaagacattcctatgatgatgcagaattttggataacacggtattgatggtatctgttaccataattcctttgatggctgatagtgtcagagcacaagatttccaatctttgacaatttttagcaccattatctttgttttgatatctatatcagacagcatggtgcgtctgacaacacagggattaagacggaaagatgaaatgattctctcaacatcttcaatggataccttgctattttttctggcattatctatatgtgcgagaatatcctctagagaatcagtatcctttttgatgatagtggatctcaatgacatgggacgtctaaaccttcttattttatcaccagattgcatggtgatttgtcttctttcttttatcataatgtaatctctaaattcatcggcaaattgtctatatctaaaatcataatatgagatgtttacctctacaaatatctgttcgtccaatgttagagtatctacatcagttttgtattccaaattaaacatggcaacggatttaattttatattcctctattaagtcctcgtcgataataacagaatgtagataatcatttaatccatcgtacatggttggaagatgcttgttgacaaaatctttaattgtcttgatgaaggtgggactatatctaacatcttgattaataaaatttataacattgtccataggatactttgtaactagttttatacacatctcttcatcggtaagtttagacagaatatcgtgaacaggtggtatattatattcatcagatatacgaagaacaatgtccaaatctatattgtttaatatattatatagatgtagcgtagctcctacaggaatatctttaactaagtcaatgatttcatcaaccgttagatctattttaaagttaatcatataggcattgatttttaaaaggtatgtagccttgactacattctcattaattaaccattccaagtcactgtgtgtaagaagattatattctatcataagcttgactacatttggtcccgataccattaaagaattcttatgatataaggaaacagcttttaggtactcatctactctacaagaattttggagagccttaacgatatcagtgacgtttattatttcaggaggaaaaaacctaacattgagaatgtcggagttaatagcttccagatacagtgattttggcaatagtccgtgtaatccataatccagtaacacgagctggtgcttgctagacaccttttcaatgtttaatttttttgaaataagctttgataaagccttcctcgcaaattccggatacatgaacatgtcggcgacatgattaagtattgttttttcattatttttatattttctcaacaagttctcaataccccaatagatgatagaatatcacccaatgcgtccatgttgtctatttccaacaggtcgctatatccaccaatagaagtttttccaaaaaagattctaggaacagttctaccaccagtaatttgttcaaaatagtcacgcaattcattttcgggtttaaattctttaatatcgacaatttcatacgctcctcttttgaaactaaacttatttagaatatccagtgcatttctacaaaaaggacatgtatacttgacaaaaattgtcactttgttattggccaacctttgttgtacaaattcctcggccattttaatatttaagtgatataaaactatctcgacttatttaactctttagtcgagatatatggacgcagatagctatatgatagccaactacagaaggcaaacgctataaaaaacataattacgacgagcatatttataaatatttttattcagcattacttgatatagtaatattaggcacagtcaaacattcaaccactctcgatacattaactctctcattttctttaacaaattctgcaatatcttcgtaaaaagattcttgaaactttttagaatatctatcgactctagatgaaatagcgttcgtcaacatactatgttttgtatacataaaggcgcccattttaacagtttctagtgacaaaatgctagcgatcctaggatcctttagaatcacatagattgacgattcgtctctcttagtaactctagtaaaataatcatacaatctagtacgcgaaataatattatccttgacttgaggagatctaaacaatctagttttgagaacatcgataagttcatcgggaatgacatacatactatctttaatagaactcttttcatccagttgaatggattcgtccttaaccaactgattaatgagatcttctattttatcattttccagatgatatgtatgtccattaaagttaaattgtgtagcgcttctttttagtctagcagccaatactttaacatcactaatatcgatatacaaaggagatgatttatctatggtattaagaattcgtttttcgacatctgtcaaaaccaattcctttttgcctgtatcatccagttttccatcctttgtaaagaaattattttctactagactattaataagactgataaggattcctccataattgcacaatccaaactttttaacaaaactagactttacaagatctacaggaatgcgtacttcaggtttcttagcttgtgattttttcttttgtggacattttcttgtgaccaactcatctaccatttcattgattttagcagtgaaataagctttcaatgcacgggcactgatactattgaaaacgagttgatcttcaaattccgccatttaagttcaccaaacaacttttaaatacaaatatatcaatagtagtagaataagaactataaaaaaaataataattaaccaataccaaccccaacaaccggtattattagttgatgtgactgttttctcatcacttagaacagatttaacaatttctataaagtctgtcaaatcatcttccggagaccccataaatacaccaaatatagcggcgtacaacttatccatttatacattgaatattggcttttctttatcgctatcttcatcatattcatcatcaatatcaacaagtcccagattacgagccagatcttcttctacattttcagtcattgatacacgttcactatctccagagagtccgataacgttagccaccacttctctatcaatgattagtttcttgagtgcgaatgtaatttttgtttccgttccggatctatagaaaactacaggtgtgataattgccttggccaattgtctttctcttttactgagtgattctagttcaccttctatagatctgagaatggatgattctccagtcgaaacatattctaccatggatccgtttaatttgttgatgaagatggattcatccttaaatgttttctctgtaatagtttccaccgaaagactatgcaaagaatttggaatgcgttccttgtgcttaatgtttccatagacggcttctagaagttgatacaacataggactagccgcggtaacttttatttttagaaagtatccatcgcttctatcttgtttagatttatttttataaagtttagtctctccttccaacataataaaagtggaagtcatttgactagataaactatcagtaagttttatagagatagacgaacaattagcgtattgagaagcatttagtgtaacgtattcgatacattttgcattagatttactaatcgattttgcatactctataacacccgcacaagtctgtagagaatcgctagatgcagtaggtcttggtgaagtttcaactctcttcttgattaccttactcatgattaaacctaaataattgtactttgtaatataatgatatatattttcactttatctcatttgagaataaaaatgtttttgtttaaccactgcatgatgtacagatttcggaatcgcaaaccaccagtggttttattttatccttgtccaatgtgaattgaatgggagcggatgcgggtttcgtacgtagatagtacattcccgtttttagaccgagactccatccgtaaaaatgcatactcgttagtttggaataactcggatctgctatatggatattcatagattgactttgatcgatgaaggctcccctgtctgcagccatttttatgatcgtcttttgtggaatttcccaaatagttttataaactcgcttaatatcttctggaaggtttgtattctgaatggatccaccatctgccataatcctattcttgatctcatcattccataattttctctcggttaaaactctaaggagatgcggattaactacttgaaattctccagacaatactctccgagtgtaaatattactggtatacggttccaccgactcattatttcccaaaatttgagcagttgatgcagtcggcataggtgccaccaataaactatttctaagaccgtatgttctgattttatcttttagaggttcccaattccaaagatccgacggtacaacattccaaagatcatattgtagaataccgttactggcgtacgatcctacatatgtatcgtatggtccttccttctcagctagttcacaactcgcctctaatgcaccgtaataaatggtttcgaagatcttcttatttagatcttgtgcttccaggctatcaaatggataatttaagagaataaacgcgtccgctaatccttgaacaccaataccgataggtctatgtctcttattagagatttcagcttctggaataggataataattaatatctataattttattgagatttctgacaattactttgaccacatccttcagtttgagaaaatcaaatcgcccatctattacaaacatgttcaaggcaacagatgccagattacaaacggctacctcattagcatccgcatattgtattatctcagtgcaaagattactacacttgatagttcctaaattttgttgattactctttttgttacacgcatccttataaagaatgaatggagtaccagtttcaatctgagattctataatcgctttccagacgactcgagcctttattatagatttgtatctcctttctctttcgtatagtgtatacaatcgttcgaactcgtctccccaaacattgtccaatccaggacattcatccggacacatcaacgaccactctccgtcatccttcactcgtttcataaagagatcaggaatccaaagagctataaatagatctctggttctatgttcctcgtttcctgtattctttttaagatcgaggaacgccataatatcagaatgccacggttccaagtatatggccataactccaggccgtttgtttcctccctgatctatgtatctagcggtgttattataaactctcaacattggaataataccgtttgatataccattggtaccggagatatagcttccactggcacgaatattactaattgatagacctattccccctgccattttagagattaatgcgcatcgttttaacgtgtcatagataccctctatgctatcatcgatcatgttaagtagaaaacagctagacatttggtgacgactagttcccgcattaaataaggtaggagaagcgtgcgtaaaccatttttcagaaagtagattgtacgtctcaatagctgagtctatatcccattgatgaattcctactgcgacacgcattaacatgtgctgaggtctttcaacgatcttgttgtttattttcaacaagtaggatttttccaaagttttaaaaccaaaatagttgtatgaaaagtctcgttcgtaaataataaccgagttgagtttatccttatatttgttaactatatccatggtgatacttgaaataatcggagaatgtttcccatttttaggattaacatagttgaataaatcctccatcacttcactaaatagtttttttgtttccttgtgtagatttgatacggctattctggcggctagaatggcataatccggatgttgtgtagtacaagtggctgctatttcggctgccagagtgtccaattctaccgttgttactccattatatattccttgaataaccttcatagctattttaataggatctatatgatccgtgtttaagccataacataattttctaatacgagacgtgattttatcaaacatgacattttccttgtatccatttcgtttaatgacaaacatttttgttggtgtaataaaaaaattatttaacttttcattaatagggatttgacgtatgtagcgtacaaaattatcgttcctggtatatagataaagagtcctatatatttgaaaatcgttacggctcgattaaactttaatgattgcatagtgaatatatcattaggatttaactccttgactatcagggcggcaccagaaattaccatcaaaagcattaatacagttatgccgatcgcagttagaacggttatagcatccaccatttatatctaaaaattagatcaaagaatatgtgacaaagtcctagttgtatactgagaattgacgaaacaatgtttcttacatatttttttcttattagtaactgacttaatagtaggaactggaaagctagacttgattattctataagtatagatacccttccaaataatattctctttgataaaagttccagaaaatgtagaattttttaaaaagttatcttttgctattaccaagattgtgtttagacgcttattattaatatgagtgatgaaatccacaccgcctctagatatcgcttttatttccacattagatggtaaatccaatagtgaaactatctttttaggaatgtatggactcgcgtttagaggagtgaacgtcttaggcgtcggaaaggatgattcatcaaacgaataaacaatttcacaaatggatgttaatgtattagtaggaaattttttgacgctagtggaattgaagattctaatggatgatgttctacctatttcatccgataacatgttaatttccgacaccaacggttttaatatttcgatgatatacggtagtctctctttcggacttatatagcttattccacaatacgagtcattatatactccaaaaaacaaaataactagtataaaatctgtatcgaatgggaaaaacgaaattatcgacataggtatagaatctggaacattgaacgtattaatacttaattctttttctgtggtaagtaccgataggttattgacattgtatggttttaaatattctataacttgagacttgatagatattagtgatgaattgaaaattatttttatcaccacgtgtgtttcaggatcatcgtcgacgcccgtcaaccaaccgaatggagtaaaataaatatcattaatatatgctctagatattagtatttttatcaatcctttgattatcatcttctcgtaggcgaatgattccatgatcaagagtgatttaagaacatcctccggagtattaatgggcttagtaaacagtccatcgttgcaataataaaagttatccaagttaaaggatattatgcattcgtttaaagatatcacctcatctgacggagacaattttttggtaggttttagagactttgaagctacttgtttaacaaagttattcatcgtcgtttactattctatttaattttgtagttaatttatcacatatcacattaattgactttttggtccatttttccatacgtttatattcttttaatcctgcgttatccgtttccgttatatccagggatagatcttgcaagttaaatagaatgctcttaaataatgtcatttttttatccgctaaaaatttaaagaatgtataaacttttttcaaagatttaaaacttttaggtggagttctagtacacaatatcataaacaaactaataaacatcccgcattcagattccaacagctgattaacttccacattaatacagcctattttcgctccaaatgtacattcgaaaaatctgaataaaacatcgatgtcacaatttgtattatccaatacagaatgtctgtgattcgtgttaaaaccatcggagaaggaatagaaataaaaattattatagtggtggaattcagttggaatattgcctccggagtcataaaaggatactaaacattgttttttatcataaattacacatttccaatgagacaaataacaaaatccaaacattacaaatctagaggtagaacttttaattttgtctttaagtatatacgataagatatgtttattcataaacgcgtcaaatttttcatgaatcgctaaggagtttaagaatctcatgtcaaattgtcctatataatccacttcggatccataagcaaactgagagactaagttcttaatacttcgattgctcatccaggctcctctctcaggctctattttcatcttgacgacctttggattttcaccagtatgtattcctttacgtgataaatcatcgattttcaaatccatttgtgagaagtctatcgccttagatactttttcccgtagtcgaggtttaaagaaatacgctaacggtatactagtaggtaactcaaagacatcatatatagaatggtaacgcgtctttaactcgtcggttaactctttcttttgatcgagttcgtcgctactattgggtctgctcaggtgccccgactctactagttccaacatcataccgataggaatacaagacactttgccagcggttgtagatttatcatatttctccactacatatccgttacaatttgttaaaaatttagatacatctatattgctacataatccagctagtgaatatatatgacataataaattggtaaatcctagttctggtattttactaattactaaatctgtatatctttccatttatcatggaaaagaatttaccagatatcttcttttttccaaactgcgttaatgtattctcttacaaatattcacaagatgaattcagtaatatgagtaaaacggaacgtgatagtttctcattggcggtgtttccagttataaaacatagatggcataacgcacacgttgtaaaacataaaggaatatacaaagttagtacagaagcacgtggaaaaaaagtatctcctccatcactaggaaaacccgcacacataaacctaaccgcgaagcaatatatatacagtgaacacacaataagctttgaatgttatagttttctaaaatgtataacaaatacagaaatcaattcgttcgatgagtatatattaagaggactattagaagctggtaatagtttacagatattttccaattccgtaggtaaacgaacagatactataggtgtactagggaataagtatccatttagcaaaattccattggcctcattaactcctaaagcacaacgagagatattttcagcgtggatttctcatagacctgtagttttaactggaggaactggagtgggtaagacgtcacaggtacccaagttattgctttggtttaattatttatttggtggattctctactctagataaaatcactgactttcacgaaagaccagtcattctatctcttcctaggatagctttagttagattgcatagcaataccattttaaaatcattgggatttaaggtactagatggatctcctatttctttacggtacggatctataccggaagaattaataaacaaacaaccaaaaaaatatggaattgtattttctacccataagttatctctaacaaaactatttagttatggcactcttattatagacgaagttcatgagcatgatcaaataggagatattattatagcagtagcgagaaagcatcatacgaaaatagattctatgtttttaatgactgccacgttagaggatgacagggaacggctaaaagtatttttacctaatcccgcatttatacatattcctggagatacactgtttaaaattagcgaggtatttattcataataagataaatccatcttccagaatggcatacatagaagaagaaaagagaaatttagttactgctatacagatgtatactcctcctgatggatcatccggtatagtctttgtggcatccgttgcacagtgtcacgaatataaatcatatttagaaaaaagattaccgtatgatatgtatattattcatggtaaggtcttagatatagacgaaatattagaaaaagtgtattcatcacctaatgtatcgataattatttctactccttatttggaatccagcgttactatacacaatgttacacacatttatgatatgggtagagtttttgtccccgctccttttggaggatcgcaacaatttatttctaaatctatgagagatcaacgaaaaggaagagtaggaagagttaatcctggtacatacgtctatttctatgatctgtcttatatgaagtctatacagcgaatagattcagaatttctacataattatatattgtacgctaataagtttaatctaacactccccgaagatttgtttataatccctacaaatttggatattctatggcgtacaaaggaatatatagactcgttcgatattagtacagaaacatggaataaattattatccaattattatatgaagatgatagagtatgctaaactttatgtactaagtcctattctcgctgaggagttggataactttgagaggacgggagaattaactagtattgtacgagaagccattttatctctaaatttacgaattaagattttaaattttaaacataaagatgatgatacgtatatacacttttgtaaaatattattcggtgtctataacggaacaaacgctactatatattatcatagacctctaacgggatatatgaatatgatttcagatactatatttgttcctgtagataataactaaaaatcaaactctaatgaccacatctttttttagagatgaaaaattttctacatctccttttgtagacacgactaaacattttgcagaaaaaagtttattagtgtttagataatcgtatacttcatcagtgtagatagtaaatgtgaacagataaaaggtattcttgctcaatagattggtaaattccatagaatatattaatcctttcttcttgagatcccacatcatttcaaccagagacgttttatccaatgatttacctcgtactataccacatacaaaactagattttgcagtgacgtcgtacctggtattcctaccaaacaaaattttacttttagttcttttagaaaattctaaggtagaatctctatttgccaatatgtcatctatggaattaccactagcaaaaaatgatagaaatatatattgatacatcgcagctggttttgatctactatactttaaaaacgaatcagattccataattgcctgtatatcatcagctgaaaaactatgttttacacgtattccttcggcatttctttttaatgatatatcttgtttagacaatgataaagttatcatgtccatgagagacgcgtctccgtatcgtataaatatttcattagatgttagacgcttcattaggggtatacttctataaggtttcttaatcagtccatcattggttgcgtcaagaactactatcggatgttgttgggtatctctagtgttacacatggccttactaaagtttgggtaaataactatgatatctctattaattatagatgcatatatttcattcgtcaaggatattagtatcgacttgctatcgtcattaatacgtgtaatgtaatcatataaatcatgcgatagccaaggaaaatttaaatagatgttcatcatataatcgtcgctataattcatattaatacgttgacattgactaatttgtaatatagcctcgccacgaagaaagctctcgtattcagtttcatcgataaaggataccgttaaatataactggttgccgatagtctcatagtctattaagtggtaagtttcgtacaaatacagaatccctaaaatattatctaatgttggattaatctttaccataactgtataaaatggagacggagtcataactattttaccgtttgtacttactggaatagatgaaggaataatctccggacatgctggtaaagacccaaatgtctgtttgaagaaatccaatgttccaggtcctaatctcttaacaaaaattacgatattcgatcccgatatcctttgcattctatttaccagcatatcacgaactatattaagattatctatcatgtctattctcccaccgttatataaatcgcctccgctaagaaacgttagtatatccatacaatggaatacttcatttctaaaatagtattcgttttctaattctttaatgtgaaatcgtatactagaaagggaaaaattatctttgagttttccgttagaaaagaaccacgaaactaatgttctgattgcgtccgattccgttgctgaattaatggatttacaccaaaaactcatataacttctagatgtagaagcattcgctaaaaaattagtagaatcaaaggatataagtagatgttccaacaagtgagcaattcccaagatttcatctatatcattctcgaatccgaaattagaaattcccaagtagatatcctttttcatccgatcgttgatgaaaatacgaactttattcggtaagacaatcatttactaaggagtaaaataggaagtaatgttcgtatgtcgttatcatcgtataaattaaaggtgtgttttttaccattaagtgacattataattttaccaatattggaattataatataggtgtatttgcgcactcgcgacggttgatgcatcggtaaatatagctgtatctaatgttctagtcggtatttcatcatttcgctgtctaataatagcgttttctctatctgtttccattacagctgcctgaagtttattggtcggataatatgtaaaataataagaaatacatacgaataacaaaaataaaataagatataataaagatgccatttagagatctaattttgttcaacttgtccaaattcctacttacagaagatgaggaatcgttggagatagtgtcttccttatgtagaggatttgaaatatcttatgatgacttgataacttactttccagataggaaataccataaatatatttataaagtatttgaacatgtagatttatcggaggaattaagtatggaattccatgatacaactttgcgagatttagtttatcttagattgtacaagtattccaagtgtatacggccgtgttataaattaggagataatctaaaaggcatagttgttataaaggacaggaatatttatattagggaagcaaatgatgacttgatagaatatctcctcaaggaatacactcctcagatttatacatattctaatgagcgcgtccccataactggttcaaaattaattctttgtggattttctcaagttacatttatggcgtatacaacgtcgcatataacaacaaataaaaaggtagatgttctcgtttccaaaaaatgtatagatgaactagtcgatccaataaattatcaaatacttcaaaatttatttgataaaggaagcggaacaataaacaaaatactcaggaagatattttattcggtaaccggtggccaaactccataggtagctttttctatttcggattttagaatttccaaattcaccagcgatttatcggttttggtgaaatccaaggatttattaatgtccacaaatgccatttgttttgtctgtggattgtatttgaaaatggaaacgatgtagttagatagatgcgctgcgaagtttcctattagggttccgcgcttcacgtcacccagcatacttgaatcaccatcctttaaaaaaaatgataagatatcaacatggagtatatcatactcggattttaattcttctactgcatcactgacattttcacaaatactacaatacggtttaccgaaaataatcagtacgttcttcatttatgggtatcaaaaacttaaaatcgttactgctggaaaataaatcactgacgatattagatgataatttatacaaagtatacaatggaatatttgtggatacaatgagtatttatatagccgtcgccaattgtgtcagaaacttagaagagttaactacggtattcataaaatacgtaaacggatgggtaaaaaagggagggcatgtaaccctttttatcgatagaggaagtataaaaattaaacaagacgttagagacaagagacgtaaatattctaaattaaccaaggacagaaaaatgctagaattagaaaagtgtacatccgaaatacaaaatgttaccggatttatggaagaagaaataaaggcaaaaatgcaattaaaaatcgataaacttacatttcaaatatatttatctgattctgataacataaaaatatcattgaatgagatactaacacatttcaacaataatgagaatgttacattattttattgtgatgaacgagacgcagaattcgttatgtgtctcgaggctaaaacacatttctctaccacaggagaatggccgttgataataagtaccgatcaggatactatgctatttgcatctactgataatcatcctaagatgataaaaaacttaactcaactgtttaaatttgttccctcggcagaggataactatttagcaaaattaacggcgttagtgaatggatgtgatttctttcctggactctatggggcatctataacacccaccaacttaaacaaaatacaattgtttagtgattttacaatcgataatatagtcactagtttggcaattaaaaattattatagaaagactaactctaccgtagacgtgcgtaatattgttacgtttataaacgattacgctaatttagacgatgtctactcgtatgttcctccttgtcaatgcactgttcaagaatttatattttccgcattagatgaaaaatggaatgaatttaaatcatcttatttagagaccgttccgttaccctgtcaattaatgtacgcgttagaaccacgtaaggagattgatgtttcagaagttaaaactttatcatcttatatagatttcgaaaatactaaatcagatatcgatgttataaaatctatatcctcgatttttggatattctaacgaaaactgtaacacgatagtattcggcatctataaggataatttactactgagtataaataattcattttactttaacgatagtctgttaataaccaatactaaaagtgataatataataaatataggttactagattaaaaatggtgttccaactcgtgtgctctacatgcggtaaagatatttctcacgaacgatataaattgattatacgaaaaaaatcattaaaggatgtactcgtcagtgtaaagaacgaatgttgtaggttaaaattatctacacaaatagaacctcaacgtaacttaacagtgcaacctctattggatataaactaatatggatccggttaattttatcaagacatatgcgcctagaggttctattatttttattaattataccatgtcattaacaagtcatttgaatccatcgatagaaaaacatgtgggtatttattatggtacgttattatcggaacacttggtagttgaatctacctatagaaaaggagttcgaatagtcccattggatagtttttttgaaggatatcttagtgcaaaagtatacatgttagagaatattcaagttatgaaaatagcagctgatacgtcattaactttattgggtattccgtatggatttggtcatgatagaatgtattgttttaaattggtagctgactgttataaaaatgccggtgttgaaacatcgtctaaacgaatattaggtaaagatatttttctgagccaaaacttcacagacgataatagatggataaagatatatgattctaataatttaacattttggcaaattgattaccttaaagggtgagttaatatgcataactactcctccgttgttttttccctcgttctttttcttaacgttgtttgccatcactctcataatgtaaagatattctaaaatggtaaacttttgcatatcggacgcagaaattggtataaatgttgtaattgtattatttcccgtcaatggactagtcacagctccatcagttttatatcctttagagtatttctcactcgtgtctaacattctagagcattccatgatctgtttatcgttgatattggccggaaagatagattttttattttttattatattactattggcaattgtagatataacttctggtaaatatttttctaccttttcaatctcttctattttcaagccggctatatattctgctatattgttgctagtatcaataccttttcttgctaagaagtcatatgtggtattcactatatcagttttaactggtagttccattagcctttccacttctgcagaataatcagaaattggttctttaccagaaaatccagctactataataggctcaccgatgatcattggcaaaatcctatattgtaccagattaatgagagcatatttcatttccaataattctgctagttcttgagacattgatttatttgatgaatctagttggttctctagatactctaccatttctgccgcatacaataacttgttagataaaatcagggttatcaaagtgtttagcgtggctagaatagtgggcttgcatgtattaaagaatgcggtagtatgagtaaaccgttttaacgaattatatagtctccagaaatctgtggcgttacatacatgagccgaatgacatcgaagattgtccaatatttttaatagctgctctttgtccattatttctatatttgactcgcaacaattgtagataccattaatcactgattcctttttcgatgccggacaatagcacaattgtttagctttggactctatgtattcagaattaatagatatatctcttaatacagattgcactatacattttgaaactatgtcaaaaattgtagaacgacgctgttctgcagccatttaactttaaataatttacaaaaatttaaaatgagcatccgtataaaaatcgataaactgcgccaaattgtggcatatttttcagagttcagtgaagaagtgtctataaatgtagactcgacggatgagttaatgtatatttttgccgccttgggcggatctgtaaacatttgggccattatacctctcagtgcatcagtgttctaccgcggagccgaaaatattgtgtttaatcttccggtgtccaaggtaaaatcgtgtttgtgtagttttcacaatgatgccatcatagatatagaacctgatctggaaaataatctagtaaaactttctagttatcatgtagtaagtgtcgattgtaacaaggaactgatgcctattaggacagatactactatttgtctaagtatagatcaaaagaaatcttacgtgtttaattttcacaagtatgaagaaaaatgttgtggtagaaccgtcattcatttagaatggttgttgggctttatcaagtgtattagtcagcatcagcatttggctattatgtttaaagatgacaatattattatgaagactcctggtaatactgatgcgttttccagggaatattctatgactgaatgttctcaagaactacaaaagttttctttcaaaatagctatctcgtctctcaacaaactacgaggattcaaaaagagagtcaatgtttttgaaactagaatcgtaatggataatgacgataacattctaggaatgttgttttcggatagagttcaatcctttaagatcaacatctttatggcgtttttagattaatactttcaatgagataaatatgggtggcggagtaagtgttgagctccctaaacgggatccgcctccgggagtacccactgatgagatgttattaaacgtggataaaatgcatgacgtgatagctcccgctaagcttttagaatatgtgcatataggaccactagcaaaagataaagaggataaagtaaagaaaagatatccagagtttagattagtcaacacaggacccggtggtctttcggcattgttaagacaatcgtataatggaaccgcacccaattgctgtcgcacttttaatcgtactcattattggaagaaggatggaaagatatcagataagtatgaagagggtgcagtattagaatcgtgttggccagacgttcacgacactggaaaatgcgatgttgatttattcgactggtgtcagggggatacgttcgatagaaacatatgccatcagtggatcggttcagcctttaataggagtgatagaactgtagagggtcaacaatcgttaataaatctgtataataagatgcaaacattatgtagtaaagatgctagtgtaccaatatgtgaatcatttttgcatcatttacgcgcacacaatacagaagatagcaaagagatgatcgattatattctaagacaacagtctgcggactttaaacagaaatatatgagatgtagttatcccactagagataagttagaagagtcattaaaatatgcggaacctcgagaatgttgggatccagagtgttcgaatgccaatgttaatttcttactaacacgtaattataataatttaggactttgcaatattgtacgatgtaatactagcgtgaacaacttacagatggataaaacttcctcattaagattgtcatgtggattaagcaatagtgatagattttctactgttcccgtcaatagagcaaaagtagttcaacataatattaaacattcgttcgacctaaaattgcatttgatcagtttattatctctcttggtaatatggatactaattgtagctatttaaatgggtgccgcggcaagcatacagacgacggtgaatacactcagcgaacgtatctcgtctaaattagaacaagaagcgaacgctagtgctcaaacaaaatgtgatatagaaatcggaaatttttatatccgacaaaaccatggatgtaacctcactgttaaaaatatgtgctctgcggacgcggatgctcagttggatgctgtgttatcagccgctacagaaacatatagtggattaacaccggaacaaaaagcatacgtgccagctatgtttactgctgcgttaaacattcagacaagtgtaaacactgttgttagagattttgaaaattatgtgaaacagacttgtaattctagcgcggtcgtcgataacaaattaaagatacaaaacgtaatcatagatgaatgttacggagccccaggatctccaacaaatttggaatttattaatacaggatctagcaaaggaaattgtgccattaaagcgttgatgcaattgacgactaaggccactactcaaatagcacctagacaagttgctggtacaggagttcagttttatatgattgttatcggtgttataatattggcagcgttgtttatgtactatgccaagcgtatgctgttcacatccaccaatgataaaatcaaacttattttagccaataaggaaaacgtccattggactacttacatggacacattctttagaacttctccgatggttattgctaccacggatatacaaaactgaaaatatattgataatattttaatagattaacatggaagttatcgctgatcgtctagacgatatagtgaaacaaaatatagcggatgaaaaatttgtagattttgttatacacggtctagagcatcaatgtcctgctatacttcgaccattaattaggttgtttattgatatactattatttgttatagtaatttatatttttacggtacgtctagtaagtagaaattatcaaatgttgttggtggcgctagtcatcacattaactattttttattactttatactataatagtactagactgacttctaacaaacatctcacctgccataaataaatgcttgatattaaagtcttctatttctaacactattccatctgtggaaaataatactctgacattatcgctaattgacacatcggtgagtgatatgcctataaagtaataatcttctttgggcacatataccagtgtaccaggttctaacaacctatttactggtgctcctgtagcatactttttctttaccttgagaatatccatcgtttgcttggtcaatagcgatatgtgattttttatcaaccactcgaaaaagtaattggagtgttcatatcctctacgggctattgtctcatggccgtgtatgaaatttaagtaacacgactgtggtagatttgttctatagagccggttgccgcaaatagatagaactaccaatatgtctgtacaaatgttaaacattaattgattaacagaaaaaacaatgttcgttctgggaatagaaaccagatcaaaacaaaattcgttagaatatatgccacgtttatacattgaatataaaataactacagtttgaaaaataacagtatcatttaaacatttaacttgcggggttaatctcacaactttactgtttttaaactgttcaaaatatagcatcgatccatgagaaatacgtttagccgcctttaatagaggaaatcccaccgcctttctggatctcaccaacgacgatagttctgaccagcaactcatttcttcatcatccacctgttttaacatataataggcaggagatagatatccgtcattgcaatattccttctcgtaggcacacaatctaatattgataaaatctccattctcttctctgcatttattatcttgtttcggtggctgattaggctgtagtcttggtttaggctttggtatatcgttgttgaatctattttggtcattaaatctttcatttcttcctggtatatttttatcacctcgtttggttggatttttgtctatattatcgtttgtaacatcggtacgggtattcatttatcacaaaaaaaacttctctaaatgagtctactgctagaaaacctcatcgaagaagataccatattttttgcaggaagtatatctgagtatgatgatttacaaatggttattgccggcgcaaaatccaaatttccaagatctatgctttctatttttaatatagtacctagaacgatgtcaaaatatgagttggagttgattcataacgaaaatatcacaggagcaatgtttaccacaatgtataatataagaaacaatttgggtctaggagatgataaactaactattgaagccattgaaaactatttcttggatcctaacaatgaagttatgcctcttattattaataatacggatatgactgccgtcattcctaaaaaaagtggtaggagaaagaataagaacatggttattttccgtcaaggatcatcacctatcttgtgtattttcgaaactcgtaaaaagattaatatttataaagaaaatatggaatccgcatcgactgagtatacacctatcggagacaacaaggctttgatatctaaatatgcgggaattaatatcctaaatgtgtattctccttccacatccataagattgaatgccatttacggattcaccaataaaaataaactagagaaacttagtactaataaggaactagaatcgtatagttctagccctcttcaagaacccattaggttaaatgattttctgggactattggaatgtgttaaaaagaatattcctctaacagatattccgacaaaggattgattactataaatggagaatgttcctaatgtatactttaatcctgtgtttatagagcccacgtttaaacattctttattaagtgtttataaacacagattaatagttttatttgaagtattcgttgtattcattctaatatatgtattttttagatctgaattaaatatgttcttcatgcctaaacgaaaaatacccgatcctattgatagattacgacgtgctaatctagcgtgtgaagacgataaattaatgatctatggattaccatggatgacaactcaaacatctgcgttatcaataaatagtaaaccgatagtgtataaagattgtgcaaagcttttgcgatcaataaatggatcacaaccagtatctcttaacgatgttcttcgcagatgatgattcattttttaagtatttggctagtcaagatgatgaatcttcattatctgatatattgcaaatcactcaatatctagactttctgttattattattgatccaatcaaaaaataaattagaagccgtgggtcattgttatgaatctctttcagaggaatacagacaattgacaaaattcacagactttcaagattttaaaaaactgtttaacaaggtccctattgttacagatggaagggtcaaacttaataaaggatatttgttcgactttgtgattagtttgatgcgattcaaaaaagaatcctctctagctaccaccgcaatagatcctattagatacatagatcctcgtcgcgatatcgcattttctaacgtgatggatatattaaagtcgaataaagtgaacaataattaattctttattgtcatcatgaacggcggacatattcagttgataatcggccccatgttttcaggtaaaagtacagaattaattagacgagttggtaccaaaaattgaaaaactagcgtctttttttgctcgactgcagaccatgggaactcctaaaccgcggattctgccatggctggtgagtcagttggacctcggtcaattggagggtgtcgcgtgggtaaacaagagcaggactcgattccgcataccatggaaacacggactcaggcaagacgcacaacaagaggattttgggatctttcaggcgtgggccgaagcaaccggcgcctacgtcccaggaagagacaaacccgatttgccgacttggaagaggaacttcaggagtgctttgaaccgcaaggaggggcttaggctcgcggaggatagatccaaggacccacacgatccacacaaaatatacgaattcgtcaattccggtgtgggcgacttttcccaaccagacacctcccctgacactaacggcggtggaagtacgagtgatacccaggaggatatcttggacgaacttctcggtaatatggttctggcaccccttccagatcctggtccacctagtcttgcggtagcaccggagccctgcccccagccgcttagatccccctccctcgacaaccctacaccctttcccaacctcggtcctagcgagaacccgcttaaaaggttgctcgtgcccggtgaagaatgggagttcgaagtgacggcattttatcgcgggcgacaggtattccaacagactattagttgcccggaaggtcttagacttgtcgggagcgaggtgggggatcgcacccttcctggctggccagttacactccctgacccaggaatgtcattgactgacagaggcgttatgtcttatgtgcgccacgtattgtcttgcctcggaggcggcctggcgctctggagagcgggacagtggctttgggcacaaagactcgggcattgtcatacctattgggcagtgtccgaagaattgctgccgaatagcggacacgggccagacggtgaagtccctaaggacaaagaaggcggcgttttcgatttgggtccatttattgttgacctgatcactttcactgaggggtccggaaggagtcctcgctacgcgttgtggttttgtgtcggggaaagctggccccaggaccagccgtggacaaaacgactcgtgatggtcaaggttgttcctacttgccttcgggccttggtcgaaatggccagagtgggaggtgcatccagccttgagaacacagtcgatcttcacatttccaactctcaccccctgagtcttacgtctgaccaatataaagcgtatcttcaggacctcgtcgaagggatggacttccaaggacccggagagagttgattaattaatttttatgagctcggaggtaatgatatgtatcaatcggtgtgtagaaagtgttacatcgactcataatattatattttttatctaaaaaactaaaaataaacattgattaaattttaatataatacttaaaaatggatgttgtgtcgttagataaaccgtttatgtattttgaggaaattgataatgagttagattacgaaccagaaagtgcaaatgaggtcgcaaaaaaactaccgtatcaaggacagttaaaactattactaggagaattattttttcttagtaagttacagcgacacggtatattagatggtgccaccgtagtgtatataggatcggctcctggtacacatatacgttatttgagagatcatttctataatttaggagtgatcatcaaatggatgctaattgacggccgccatcatgatcctattttaaatggattgcgtgatgtgactctagtgactcggttcgttgatgaggaatatctacgatccatcaaaaaacaactgcatccttctaagattattttaatttctgatgtaagatccaaacgaggaggaaatgaacctagtacggcggatttactaagtaattacgctctacaaaatgtcatgattagtattttaaaccccgtggcatctagtcttaaatggagatgcccgtttccagatcaatggatcaaggacttttatatcccacacggtaataaaatgttacaaccttttgctccttcatattcagctgaaatgagattattaagtatttataccggtgagaacatgagactgactcgagttaccaaattagacgctgtaaattatgaaaaaaagatgtactaccttaataagatcgtccgtaacaaagtagttgttaactttgattatcctaatcaggaatatgactattttcacatgtactttatgctgaggaccgtgtactgcaataaaacatttcctactactaaagcaaaggtactatttctacaacaatctatatttcgtttcttaaatattccaacaacatcaactgaaaaagttagtcatgaaccaatacaacgtaaaatatctagcaaaaattctatgtctaaaaacagaaatagcaagagatccgtacgcggtaataaatagaaacgtgctactgagatatactaccgatatagagtataatgatttagttactttaataaccgttagacataaaattgattctatgaaaactgtgtttcaggtatttaacgaatcatccataaattatactccggttgatgatgattatggagaaccaatcattataacatcgtatcttcaaaaaggtcataacaagtttcctgtaaattttctatacatagatgtggtaatatctgacttatttcctagctttgttagactagatactacagaaactaatatagttaatagtgtactacaaacaggcgatggtaaaaagactcttcgtcttcccaaaatgttagagacggaaatagttgtcaagattctctatcgccctaatataccattaaaaattgttagatttttccgcaataacatggtaactggagtagagatagccgatagatctgttatttcagtcgctgattaatcaattagtagagatgagataagaacattataataatcaataatattatcttatatctcgtttagaaaaatgctaatattaaaatagctaacgctagtaatccaatcggaagccatttgatatctataatagggtatctaatttcctgattcagatagcggacagctatattctcggtagctactcgtttggaatcacaaacattatttacatctaatttactatctgtaatggaaacgtttcccaatgaaatggtacaatccgatacattgcattttgttatatttttttttaaagaggctggtaacaacgcatcgcttcgtttacatggctcgtaccaacaataatagggtaatcttgtatctattcctatccgtactatgcttttatcaggataaatacatttacatcgtatatcgtctttgttagcatcacagaatgcataaatttgttcgtccgtcatgataaaaatttaaagtgtaaatataactattatttttatagttgtaataaaaagggaaatttgattgtatactttcggttctttaaaagaaactgacttgataaaaatggctgtaatctctaaggttacgtatagtctatatgatcaaaaagagattaatgctacagatattatcattagtcatgttaaaaatgacgacgatatcggtaccgttaaagatggtagactaggtgctatggatggggcattatgtaaaacttgtgggaaaacggaattggaatgtttcggtcactggggtaaagtaagtatttataaaactcatatagttaagcctgaatttatttcagaaattattcgtttactgaatcatatatgtattcactgcggattattgcgttcacgagaaccgtattccgacgatattaacctaaaagagttatcgggacacgctcttaggagattaaaggataaaatattatccaagaaaaagtcatgttggaacagcgaatgtatgcaaccgtatcaaaaaattactttttcaaagaaaaaggtttgtttcgtcaacaagttggatgatattaacgttcctaattctctcatctatcaaaagttaatttctattcatgaaaagttttggccattattagaaattcatcaatatccagctaacttattttatacagactactttcccatccctccgctgattattagaccggctattagtttttggatagatagtatacccaaagagaccaatgaattaacttacttattaggtatgatcgttaagaattgtaacttgaatgctgatgaacaggttatccagaaggcggtaatagaatacgatgatattaaaattatttctaataacactaccagtatcaatttatcatatattacatccggcaaaaataatatgattagaagttatatcgtcgcccgacgaaaagatcagaccgctagatctgtaattggtcccagtacatctatcaccgttaatgaggtaggaatgcccgcatatattagaaatacacttacagaaaagatatttgttaatgcctttacagtggataaagttaaacaactattagcgtcaaaccaagttaaattttactttaataaacgattaaaccaattaacaagaatacgccaaggaaagtttatcaaaaataaaatacatttattgcctggtgattgggtagaagtagctgttcaagaatatacaagtattatttttggaagacagccgtctctacatagatacaacgtcatcgcttcatctatcagagctaccgaaggagatactatcaaaatatctcccggaattgccaactctcaaaatgctgatttcgacggagatgaagaatggatgatattggagcaaaatcctaaagccgtaattgaacaaagtattcttatgtatccgacgacgttactcaaacacgatattcatggagcccccgtttatggatctattcaagatgaaatcgtagcagcgtattcattgtttaggatacaagatctttgtttagatgaagtattgaacatcttggggaaatatggaagagagttcgatcctaaaggtaaatgtaaattcagcggtaaagatatctatacttacttgataggtgaaaagattaattatccgggtctcttaaaggatggtgaaattattgcaaacgacgtagatagtaattttgttgtggctatgaggcatctgtcattggctggactcttatccgatcataagtcgaacgtggaaggtatcaactttattatcaagtcatcttatgtttttaagagatatctatctatttacggttttggggtgacattcaaagatctgagaccaaattcgacgttcactaataaattggaggccatcaacgtagaaaaaatagaacttatcaaagaagcatacgccaaatatctcaacgatgtaagagacgggaaaatagttccattatctaaagctttagaggcggactatgtggaatccatgttatccaacttgacaaatcttaatatccgagagatagaagaacatatgagacaaacgctgatagatgatccagataataacctcctgaaaatggccaaagcgggttataaagtaaatcctacagaactaatgtatattctaggtacgtatggacaacaaaggattgatggtgaaccagcagagactcgagtattgggtagagtcttaccttactatcttccagactctaaggatccagaaggaagaggttacattcttaattctttaacaaaaggattaacgggttctcaatattacttttcgatgctggttgccagatctcaatctactgatatcgtctgtgaaacatcacgtaccggaacactggctagaaaaatcattaaaaagatggaggatatggtggtcgacggatacggacaagtagttataggtaatacgctcatcaagtacgccgccaattataccaaaattctaggctcagtatgtaaacctgtagatcttatctatccagatgagtccatgacttggtatttggaaattagtgctctgtggaataaaataaaacagggattcgtttactctcagaaacagaaacttgcaaagaagacattggcgccgtttaatttcctagtattcgtcaaacccaccactgaggataatgctattaaggttaaggatctgtacgatatgattcataacgtcattgatgatgtgagagagaaatacttctttacggtatctaatatagattttatggagtatatattcttgacgcatcttaatccttctagaattagaattacaaaagaaacggctatcactatctttgaaaagttctatgaaaaactcaattatactctaggtggtggaactcctattggaattatttctgcacaggtattgtctgagaagtttacacaacaagccctgtccagttttcacactactgaaaaaagtggtgccgtcaaacaaaaacttggtttcaacgagtttaataacttgactaatttgagtaagaataagaccgaaattatcactctggtatccgatgatatctctaaacttcaatctgttaagattaatttcgaatttgtatgtttgggagaattaaatccagacatcactcttcgaaaagaaacagataaatatgtagtagatataatagttaatagattatacatcaagagagcagaaataaccgaattagttgtcgaatatatgattgaacgatttatctcctttagcgtcattgtaaaggaatggggtatggagacattcattgaggacgaggataatattagatttactgtctacctaaatttcgttgaaccggaagaattgaatcttagtaagtttatgatggttcttccgggtgccgccaacaagggcaagattagtaaattcaagattcctatctctgattatacgggttatgacgacttcaatcaaacaaaaaagctcaataagatgactgtagaactcatgaatctaaaagaattgggttctttcgatttggaaaacgtcaacgtgtatcctggagtatggaatacatacgatatcttcggtatcgaggccgctcgtgaatacttgtgcgaagccatgttaaacacctatggagaagggttcgattatctgtatcagccttgtgatcttctcgctagtttactatgtgctagttacgaaccagaatcagttaataaattcaagttcggtgcagctagtactcttaagagagctacgttcggagacaataaagcattgttaaacgcggctcttcataaaaagtcagaacctattaacgataatagtagctgccacttttttagcaaggtccctaatataggaactggatattacaaatactttatcgacttgggtcttctcatgagaatggaaaggaaactatctgataagatatcttctcaaaagatcaaggaaatggaagaaacagaagacttttaattcttatcaataacatatttttctatgatctgtcttttaaacgatggattttccacaaatgcgcctctcaagtccctcatagaatgatacacgtataaaaaatatagcataggcaatgactccttatttttagacattagatatgccaaaatcatagccccgcttctatttactcccgcagcacaatgaaccaacacgggctcgtttcgttgatcacatttagataaaaaggcggttacgtcgtcaaaatatttactaatatcggtagttgtatcatctaccaacggtatatgaataatattaatattagagttaggtaatgtatatttatccatcgtcaaatttaaaacatatttgaacttaacttcagatgatggtgcatccatagcatttttataatttcccaaatacacattattggttacccttgtcattatagtgggagatttggctttgtgcatatctccagttgaacgtagtagtaagtatttatacaaacttttcttatccatttataacgtacaaatggataaaactactttatcggtaaacgcgtgtaatttagaatacgttagagaaaaggctatagtaggcgtacaagcagccaaaacatcaacacttatattctttgttattatattggcaattagtgcgctattactctggtttcagacgtctgataatccagtctttaatgaattaacgagatatatgcgaattaaaaatacggttaacgattggaaatcattaacggatagcaaaacaaaattagaaagtgatagaggtagacttctagccgctggtaaggatgatatattcgacttcaaatgtgtggatttcggcgcctattttatagctatgcgattggataagaaaacatatctgccgcaagctattaggcgaggtactggagacgcgtggatggttaaaaaggcggcaaaggtcgatccatctgctcaacaattttgtcagtatttgataaaacacaagtctaataatgttattacttgtggtaatgagatgttaaatgaattaggttatagcggttattttatgtcaccgcattggtgttccgattttagtaatatggaatagtgttagataaatgcggtaacgaatgttcctgtaaggaaccataacagtttagatttaacgttaaagatgagcataaacataataaacaaaattacaatcaaacctataacattaatatcaaacaatccaaaaaatgaaatcagtggagtagtaaacgcgtacataactcctggataacgtttagcagctgccgttcctattctagaccaaaaattcggtttcatgttttcgaagcggtgttctgcaacaagtcggggatcgtgttctacatatttggcggcgttatccagtatctgcctattgatcttcatttcgttttcgattctggctatttcaaaataaaatcccgatgatagacctccagactttataatttcatctacgatgttcagcgccgtagtaactctaataatataggctgataagctaacatcataccctcctgtatatgtgaatatggcatgatttttgtccattacaagctcggttttaactttattgcctgtaataatttctctcatctgtaggatatctatttttttgtcatgcattgccttcaagacgggacgaagaaacgtaatatcctcaataacgttatcgttttctacaataactacatattctacctttttattttctaactcggtaaaaaaattagaatcccatagggctaaatgtctagcgatatttcttttcgtttcctctgtacacatagtgttacaaaaccctgaaaagaagtgagtatacttgtcatcatttctaatgtttcctccagtccactgtataaacgcataatccttgtaatgatctggatcatccttgactaccacaacatttcttttttctggcataacttcgttgtcctttacatcatcgaacttctgatcattaatatgctcatgaacattaggaaatgtttctgatggaggtctatcaataactggcacaacaataacaggagttttcaccgccgccatttagttattgaaattaatcatatacaactctttaatacgagttatattttcgtctatccattgtttcacatttacatatttcgacaaaaagatataaaatgcgtattccaatgcttctctgtttaatgaattactaaaatatacaaacacgtcactgtctggcaataaatgatatcttagaatattgtaacaatttattttgtattgcacatgttcgtgatctatgagttcttcttcgaatggcataggatctccgaatctgaaaacgtataaataggagttagaataataatatttgagagtattggtaatatataaactctttagcggtataattagtttttttctctcaatttctatttttagatgtgatggaaaaatgactaattttgtagcattagtatcatgaactctaatcaaaatcttaatatcttcgtcacacgttagctctttgaagtttttaagagatgcatcagttggttctacagatggagtaggtgcaacaattttttgttctacacatgtatgtactggagccattgttttaactataatggtgcttgtatcgaaaaactttaatgcagatagcggaagctcttcgccgcgactttctacatcgtaattgggttctaacgccgatctctgaatggatactagttttctaagttctaatgtgattctctgaaaatgtaaatccaattcctccggcattatagatgtgtatacatcggtaaataaaactatagtatccaacgatcccttctcgcaaattctagtcttaaccaaaaaatcgtatataaccacggagatggcgtatttaagagtggattcttctaccgttttgttcttggatgtcatataggaaactataaagtccgcactactgttaagaatgattactaacgcaactatatagttcaaattaagcattttggaaacataaaataactctgtagacgatacttgactttcgaataagtttgcagacaaacgaagaaagaacagacctctcttaatttcagaagaaaactttttttcgtattcctgacgtctagagtttatatcaataagaaagttaagaattagtcggttaatgttgtatttcattacccaagtttgagatttcataatattatcaaaagacatgataatattaaagataaagcgctgactatgaacgaaatagctatatggttcgctcaagaatatagtcttgttaaacgtggaaacgataactgtatttttaatcacgtcagcggcatctaaattaaatataggtatatttattccacacactctacaatatgccacaccatcttcataataaataaattcgttagcaaaattattaattttagtgaaatagttagcgtcaactttcatagcttccttcaatctaatttgatgctcacacggtgcgaattccactctaacatcccttttccatgcctcaggttcatcgatctctataatatctagtttcttgcgtttcacaaacacgggctcgtctctcgcgatgagatctgtatagtaactatgtaaatgataactagatagaaagatgtagctatatagatgacgatcctttaagagaggtataataactttaccccaatcagataaactattgttatggtcttcggaaaaagaatttttataaatttttccagtattttccaaatatacgtacttgacatctaaaaaatccttaatgataataggaatggataatccgtctattttataaagaaatacatatcgcacattatacttttttttggaaatgggaataccgatgtgtctacataaatatgcaaagtctaaatattttttagagaatcttagttggtccaaattcttttccaagtacggtaatagatttttcatattgaacggtatcttcttaatctctggttctagttccgcattaaatgatgaaactaagtcactatttttataactaacgattacatcacctctaacatcatcatttaccagaatactgatcttcttttgtcgtaaatacatgtctaatgtgttaaaaaaaagatcatacaagttatacgtcatttcatctgtggtattcttgtcattgaaggataaactcgtactaatctcttctttaacagcctgttcaaatttatatcctatatacgaaaaaatagcaaccagtgtttgatcatccgcgtcaatattctgttctatcgtagtgtataacaatcgtatatcttcttctgtgatagtcgatacgttataaaggttgataacgaaaatatttttatttcgtgaaataaagtcatcgtaggattttggacttatattcgcgtctagtagatatgcttttatttttggaatgatctcaattagaatagtctctttagagtccatttaaagttacaaacaactaggaaattggtttatgatgtataatttttttagtttttatagattctttattctatacttaaaaaatgaaaataaatacaaaggttcttgagggttgtgttaaattgaaagcgagaaataatcataaattatttcattatcgcgatatccgttaagtttgtatcgtaatggcgtggtcaattacaaataaagcggatactagtagcttcacaaagatggctgaaatcagagctcatctaaaaaatagcgctgaaaataaagataaaaacgaggatattttcccggaagatgtaataattccatctactaagcccaaaaccaaacgagccactactcctcgtaaaccagcggctactaaaagatcaaccaaaaaggaggaagtggaagaagaagtagttatagaggaatatcatcaaacaactgaaaaaaattctccatctcctggagtcagcgacattgtagaaagcgtggccgctgtagagctcgatgatagcgacggggatgatgaacctatggtacaagttgaagctggtaaagtaaatcatagtgctagaagcgatctttctgacctaaaggtggctaccgacaatatcgttaaagatcttaagaaaattattactagaatctctgcagtatcgacggttctagaggatgttcaagcagctggtatctctagacaatttacttctatgactaaagctattacaacactatctgatctagtcaccgagggaaaatctaaagttgttcgtaaaaaagttaaaacttgtaagaagtaaatgcgtgcacttttttataaagatggtaaactctttaccgataataattttttaaatcctgtatcagacgataatccagcgtatgaggttttgcaacatgttaaaattcctactcatttaacagatgtagtagtatatgaacaaacgtgggaggaggcgttaactagattaatttttgtgggaagcgattcaaaaggacgtagacaatacttttacggaaaaatgcatgtacagaatcgcaacgctaaaagagatcgtatttttgttagagtatataacgttatgaaacgaattaattgttttataaacaaaaatataaagaaatcgtccacagattccaattatcagttggcggtttttatgttaatggaaactatgttttttattagatttggtaaaatgaaatatcttaaggagaatgaaacagtagggttattaacactaaaaaataaacacatagaaataagtcccgatgaaatagttatcaagtttgtaggaaaggacaaagtttcacatgaatttgttgttcataagtctaatagactatataagccgctattgaaactgacggatgattctagtcccgaagaatttctgttcaacaaactaagtgaacgaaaggtatacgaatgtatcaaacagtttggtattagaatcaaggatctccgaacgtatggagtcaattatacgtttttatataatttttggacaaatgtaaagtccatatctcctcttccatcaccaaaaaagttaatagcgttaactatcaaacaaactgctgaagtggtaggtcatactccatcaatttcaaaaagagcttacatggcaacgactattttagaaatggtaaaggataaaaattttttagatgtagtatctaaaactacgttcgatgaattcctatctatagtcgtagatcacgttaaatcatctacggatggatgatatagatctttacacaaataattacaagaccgataaatggaaatggataagcgtatgaaatctctcgcaatgacagctttcttcggagagctaaacacattagatattatggcattgataatgtctatatttaaacgccatccaaacaataccattttttcagtggataaggatggtcagtttatgattgatttcgaatacgataattataaggcttctcaatatttggatctgaccctcactccgatatctggagatgaatgcaagactcacgcatcgagtatagccgaacaattggcgtgtgtggatattattaaagaggatattagcgaatatatcaaaactactccccgtcttaaacgatttataaaaaaataccgcaatagatcagatactcgtatcagtcgagatacagaaaagcttaaaatagctctagctaaaggcatagattacgaatatataaaagacgcttgttaataagtaaatgaaaaaaaactagtcgtttataataaaacacaatatggatgccaacatagtatcatcttctactattgcaacgtatatagacgctttagcaaagaatgcttcagaattagaacagaggtctaccgcatacgaaataaataatgaattggaactagtatttattaagccgccattaattactttgacaaatgtagtgaatatctctacgattcaggaatcgtttattcgatttaccgttactaataaggaaggtgtcaaaattagaactaagattccattatctaaggtacatggtctagatgtaaaaaatgtacagttagtagatgctatagataacatagtttgggaaaagaaatcattagtgacggaaaatcgtcttcacaaagaatgcttgttgagactatcgacagaggaacgtcatatatttttggattacaagaaatatggatcctctatccgactagaattagtcaatcttattcaagcaaaaacaaaaaactttacgatagactttaagctaaaatattttctaggatccggtgcccaatctaaaagttctttgttgcacgctattaatcatccaaagtcaaggcctaatacatctctggaaatagaattcacacctagagacaatgaaaaagttccatatgatgaactaataaaggaattgacgactctatcacgtcatatatttatggcttctccagagaatgtaattctttctccgcctattaacgcacctataaagacttttatgttgcctaaacaagatatagtaggtctggatctggaaaatctatatgccgtaactaagactgacggcattcctataactatcagagttacatcaaacgggttgtattgttattttacacatcttgggtatattattagatatccagttaagagaataatagattccgaagtagtagtctttggtgaggcagttaaggataagaactggaccgtatatctcattaagctaatagagcctgtgaatgcaatcaatgatagactagaagaaagtaagtatgttgaatctaaactagtggatatttgtgatcggatagtattcaagtcaaagaaatatgaaggtccgtttactacaactagtgaagtcgtcgatatgttatctacatatttaccaaagcaaccagaaggtgttattctgttctattcaaagggacctaaatctaacattgattttaaaattaaaaaggaaaatactatagaccaaactgcaaatgtagtatttaggtacatgtccagtgaaccaattatctttggagaatcgtctatctttgtagagtataagaaatttagcaacgataaaggctttcctaaagaatatggttctggtaagattgtgttatataacggcgttaattatctaaataatatctattgtttggaatatattaatacacataatgaagtgggtattaagtccgtggttgtacctattaagtttatagcagaattcttagttaatggagaaatacttaaacctagaatcgataaaaccatgaaatatattaactcagaagattattatggaaatcaacataatatcatagtcgaacatttaagagatcaaagcatcaaaataggagatatctttaacgaggataaactatcggatgtgggacatcaatacgccaataatgataaatttagattaaatccagaagttagttattttacgaataaacgaactagaggaccgttgggaattttatcaaactacgtcaagactcttcttatttctatgtattgttccaaaacatttttagacgattccaacaaacgaaaggtattggcgattgattttggaaacggtgctgacctggaaaaatacttttatggagagattgcgttattggtagcgacggatccggatgctgatgctatagctagaggaaatgaaagatacaacaaattaaactctggaattaaaaccaagtactacaaatttgactacattcaggaaactattcgatccgatacatttgtctctagtgtcagagaagtattctattttggaaagtttaatatcatcgactggcagtttgctatccattattcttttcatccgagacattatgctaccgtcatgaataacttatccgaactaactgcttctggaggcaaggtattaatcactaccatggacggagacaaattatcaaaattaacagataaaaagacttttataattcataagaatttacctagtagcgaaaactatatgtctgtagaaaaaatagctgatgatagaatagtggtatataatccatcaacaatgtctactccaatgactgaatacattatcaaaaagaacgatatagtcagagtgtttaacgaatacggatttgttcttgtagataacgttgatttcgctacaattatagaacgaagtaaaaagtttattaatggcgcatctacaatggaagatagaccgtctacaaaaaactttttcgaactaaatagaggagccattaaatgtgaaggtttagatgtcgaagacttacttagttactatgttgtttatgtcttttctaagcggtaaataataatatggtatgggttctgatatccccgttctaaatgcattaaataattccaatagagcgatttttgttcctataggaccttccaactgtggatactctgtattgttaatagatatattaatacttttgtcgggtaacagaggttctacgtcttctaaaaataaaagtttgataacatctggcctgttcataaataaaaacttggcgattctatatatactcttattatcaaatctagccattgtcttatagatgtgagctactgtaggtgtaccatttgattttctttctaatactatatatttctctcgaagaagttcttgcacatcatctgggaataaaatactactgttgagtaaatcagttattttttttatatcgatattgatggacatttttatagttaaggataataagtatcccaaagtcgataacgacgataacgaagtatttatacttttaggaaatcacaatgactttatcagatcaaaattaacaaaattaaaggagcatgtatttttttctgaatatattgtgactccagatacatatggatctttatgcgtcgaattaaatgggtctagttttcagcacggtggtagatatatagaggtggaggaatttatagatgctggaagacaagttagatggtgttctacatccaatcatatatctgaagatatacccgaagatatacacactgataaatttgtcatttatgatatatacacttttgacgctttcaagaataaacgattggtattcgtacaggtacctccgtcgttaggagatgatagctatttgactaatccgttattgtctccgtattatcgtaattcagtagccagacaaatggtcaatgatatgatttttaatcaagattcatttttaaaatatttattagaacatctgattagaagccactatagagtttctaaacatataacaatagttagatacaaggataccgaagaattaaatctaacgagaatatgttataatagagataagtttaaggcgtttgtattcgcttggtttaacggcgtttcggaaaatgaaaaggtactagatacgtataaaaaggtatctaatttgatataatgaattcagtgactgtatcacacgcgccatatactattacttatcacgatgattgggaaccagtaatgagtcaattggtagagttttataacgaagtagccagttggctgctacgagacgagacgtcgcctattcctgataagttctttatacagttgaaacaaccgcttagaaataaacgagtatgtgtgtgcggtatagatccgtatccgaaagatggaactggtgtaccgttcgaatcaccaaattttacaaaaaaatcaattaaggagatagcttcatctatatctagattaaccggagtaattgattataaaggttataaccttaatataatagacggggttataccctggaattattacttaagttgtaaattaggagaaacaaaaagtcacgcgatctactgggataagatttccaagttactgctgcagcatataactaaacacgttagtgttctttattgtttgggtaaaacagatttctcgaatatacgggcaaagttagaatccccggtaactaccatagtgggatatcatccagcggctagagaccgtcaattcgagaaagatcgatcatttgaaattatcaacgttttactggaattagacaacaaggtacctataaattgggctcaagggtttatttattaatgctttagtgaaattttaacttgtgttctaaatggatgcggctattagaggtaatgatgttatctttgttcttaagactataggtgtcccgtcagcgtgcagacaaaatgaagatccaagatttgtagaagcatttaaatgcgacgagttagaaagatatattgagaataatccagaatgtacactattcgaaagtcttagggatgaggaagcatactctatagtcagaattttcatggatgtagatttagacgcgtgtctagacgaaatagattatttaacggctattcaagattttattatcgaggtgtcaaactgtgtagctagattcgcgtttacagaatgcggcgccattcatgaaaatgtaataaaatccatgagatctaatttttcattgactaagtctacaaatagagataaaacaagttttcatattatctttttagacacgtataccactatggatacattgatagctatgaaacgaacactattagaattaagtagatcatctgaaaatccactaacaagatcgatagacactgccgtatataggagaaaaacaactcttcgggttgtaggtactaggaaaaatccaaattgcgacactattcatgtaatgcaaccacctcatgataatatagaagattacctattcacttacgtggatatgaacaacaatagttattacttttctctacaacgacgattggaggatttagttcctgataagttatgggaaccagggtttatttcattcgaagacgctataaaaagagtttcaaaaatattcattaattctataataaactttaatgatctcgatgaaaataattttacaacggtaccactggtcatagattacgtaacaccttgtgcattatgtaaaaaacgatcgcataaacatccgcatcaactatcgttggaaaatggtgctattagaatttacaaaactggtaatccacatagttgtaaagttaaaattgttccgttggatggtaataaactgtttaatattgcacaaagaattttagacactaactctgttttattaaccgaacgaggagaccatatagtttggattaataattcatggaaatttaacagcgaagaacccttgataacaaaactaattttgtcaataagacatcaactacctaaggaatattcaagcgaattactctgtccaagaaaacgaaagactgtagaagctaacatacgagacatgttagtagattcagtggagaccgatacctatccggataaacttccgtttaaaaatggtgtattggacctggtagacggaatgttttactctggagatgatgctaaaaaatatatgtgtactgtatcaaccggatttaaatttgacgatacaaagttcgtcgaagacagtccagaaatggaagagttaatgaatatcattaacgatatccaaccattaacggatgaaaataagaaaaatagagagctatatgaaaaaacattatctagttgtttatgcggtgctaccaaaggatgtttaacattcttttttggagaaactgcaactggaaagtcgacaaccaaacgtttgttaaagtctgctatcggtgacctgtttgttgagacgggtcaaacaattttaacagatgtattggataaaggacctaatccatttatcgctaacatgcatttgaaaagatctgtattctgtagcgaactacctgattttgcatgtagtgggtcaaagaaaatcagatctgataatattaaaaagttgacagaaccttgtgtcattggaagaccgtgtttctccaataaaattaataatagaaaccatgcgacaatcattatcgatactaattacaaacctgtttttgataggatagataacgcattaatgagaagaattgccgtcgtgcgattcagaacacacttttctcaaccttctggtagagaggctgctgaaaataatgacgcgtacgataaagtcaaactattagacgaggggttagatggtaaaatacaaaataatagatatagattcgcatttctatacttgttggtgaaatggtacagaaaatatcatgttcctattatgaaactatatcctacacccgaagagattcctgactttgcattctatctcaaaataggtactctgttggtatctagctctgtaaagcatattccattaatgacggacctctccaaaaagggatatatattgtacgataatgtggtcactcttccgttgactactttccaacagaaaatatccaagtattttaattctagactatttggacacgatatagagagcttcatcaatagacataagaaatttgccaatgttagtgatgaatatctgcaatatatattcatagaggatatttcatctccgtaaatatatgctcatatatttatagaagatatcacatatctaaatgaataccggaattatagatttatttgataatcatgttgatagtataccaactatattacctcatcagttagctactctagattatctagttagaactatcatagatgagaacagaagcgtgttattgttccatattatgggatcaggtaaaacaataatcgctttgttgttcgccttggtagcttccagatttaaaaaggtttacattctagtgccgaacatcaacatcttaaaaattttcaattataatatgggtgtagctatgaacttgtttaatgacgaattcatagctgagaatatctttattcattccacaacaagtttttattctcttaattataacgataacgtcattaattataacggattatctcgctacaataactctatttttatcgttgatgaggcacataatatctttgggaataatactggagaacttatgaccgtgataaaaaataaaaacaagattccttttctactattgtctggatctcccattactaacacacctaatactctgggtcatattatagatttaatgtccgaagagacgatagattttggtgaaattattagtcgtggtaagaaagtaattcagacacttcttaacgaacgcggtgtgaatgtacttaaggatttgcttaaaggaagaatatcatattacgaaatgcctgataaagatctaccaacgataagatatcacggacgtaagtttctagatactagagtagtatattgtcacatgtctaaacttcaagagagagattatatgattactagacgacagctatgttatcatgaaatgtttgataaaaatatgtataacgtgtcaatggcagtattgggacaacttaatctgatgaataatttagatactttatttcaggaacaggataaggaattgtacccaaatctgaaaataaataatggcgtgttatacggagaagaattggtaacgttaaacattagttccaaatttaaatactttattaatcggatacagacactcaacggaaaacattttatatacttttctaattctacatatggcggattggtaattaaatatatcatgctcagtaatggatattctgaatataatggttctcagggaactaatccacatatgataaacggcaaaccaaaaacatttgctatcgttactagtaaaatgaaatcgtctttagaggatctattagatgtgtataattctcctgaaaacgatgatggtagtcaattgatgtttttgttttcatcaaacattatgtccgaatcctatactctaaaagaggtaaggcatatttggtttatgactatcccagatactttttctcaatacaaccaaattcttggacgatctattagaaaattctcttacgccgatatttctgaaccagttaatgtatatcttttagccgccgtatattccgatttcaatgacgaagtgacgtcattaaacgattacacacaggatgaattaattaatgttttaccatttgacatcaaaaagctgttatatctaaaatttaagacgaaagaaacgaatagaatatactctattcttcaagagatgtctgaaacgtattctcttccaccacatccatcaattgtaaaagttttattgggagaattggtcagacaatttttttataataattctcgtattaagtataacgataccaagttacttaaaatggttacatcagttataaaaaataaagaagacgctaggaattacatagatgatattgtaaacggtcacttctttgtatcgaataaagtatttgataaatctcttttatacaaatacgaaaacgatattattacagtaccgtttagactttcctacgaaccatttgtttggggagttaactttcgtaaagaatataacgtggtatcttctccataaaactgatgagatatataaagaaataaatgtcgagctttgttaccaatggataccttccagttacattggagccacacgagctgacgttagacataaaaactaatattaggaatgccgtatataagacgtatctccatagagaaattagtggtaaaatggccaagaaaatagaaattcgtgaagacgtggaattacctctcggcgaaatagttaataattctgtagttataaacgttccgtgtgtaataacctacgcgtattatcacgttggggatatagttagaggaacattaaacatcgaagatgaatcaaatgtaactattcaatgtggagatttaatctgtaaactaagtagagattcgggtactgtatcatttagcgattcaaagtactgcttttttcgaaatggtaatgcgtatgacaatggcagcgaagtcactgccgttctaatggaggctcaacaaggtatcgaatctagttttgtttttctcgcgaatatcgtcgactcataagaaagagaatagcggtaagtataaacacgaatactatggcaataattgcgaatgttttattcccttcgatatatttttgataatatgaaaaacatgtctctctcaaatcggacaaccatctcataaaatagttatctcgcgctggcgaggtggttgccgctcgtataatctccccagaataatatacttgcgtgtcgtcgttcaatttatacggatttctatagttctctgttatataatgcggttttccatcatgattagacgacgacaatagtgttctaaatttagatagttgatcagaatgaatgtttattggcgttggaaaaattatccatgctgcgtctgcagagtggttgatagttgttcctagatatgtaaaataatccaacgtactaggtagcaaattgtctagataaaatactgaatcaaacggcgcagacgtattagcggatctaatggaatccaattgattgactatcttttgaaaatatacatttttatgatccgatacttgtaagaatatagaaataatgataagtccatcatcgtgtttttttgcctcttcataagaactatattttttcttattccaatgaacaagattaatctctccagagtatttgtacacatctatcaagtgattggatccataatcgtcttcctttccccaatatatatgtagtgatgataacacatattcattggggagaaaccctccacttatatatcctcctttaaaattaatccttactagttttccagtgttctggatagtggttggtttcgactcattataatgtatgtctaacggcttcaatcgcgcgttagaaattgcttttttagtttctatattaataggagatagttgttgcggcatagtaaaaatgaaatgataactgtttaaaaatagctcttagtatgggaattacaatggatgaggaagtgatatttgaaactcctagagaattaatatctattaaacgaataaaagatattccaagatcaaaagacacgcatgtgtttgctgcgtgtataacaagtgacggatatccgttaataggagctagaagaacttcattcgcgttccaggcgatattatctcaacaaaattcagattctatctttagagtatccactaaactattacggtttatgtactacaatgaactaagagaaatctttagacggttgagaaaaggttctatcaacaatatcgatcctcactttgaagagttaatattattgggtggtaaactagataaaaaggaatctattaaagattgtttaagaagagaattaaaagaggaaagtgatgaacgtataacagtaaaagaatttggaaatgtaattctaaaacttacaacacgggataaattatttaataaagtatatataggttattgcatggcgtgttttattaatcaatcgttggaggatttatcgcatactagtatttacaatgtagaaattagaaagattaaatcattaaatgattgtattaacgacgataaatacgaatatctgtcttatatttataatatgctagttaatagtaaatgaacttttacagatctagtataattagtcagattattaagtataatagacgactagctaagtctattatttgcaaggatgactctcaaattattacactcacggcattcgttaaccaatgcctatggtgtcataaacgagtatccgtgtccgctattttattaactactgataacaaaatattagtatgtaacagacgagatagttttctctattctgaaataattagaactagaaacatgtttagaaagaaacgattatttctgaattattccaattatttgtccaaacaggaaagaagtatactatcgtcatttttttctctatatccagctactgctgataatgatagaatagacgctatttatccgggtggcatacccaaaaggggtgagaatgttccagagtgtctatccagggaaatcaaagaagaagttaatatagacaattcttttgtattcatagacactcggttttttattcatggtatcatagaagataccattatcaacaaattttttgaggtaattttctttgtcggaagaatatctctaacgagtgatcaaattattgatacctttaaaagtaatcatgaaatcaaggatctaatatttttagatccgaattcaggtaatggactccaatacgaaattgcaaaatatgctctagatactgcaaaacttaaatgttacggccatagaggatgttattatgaatcattaaaaaaattaactgaggatgattgattagaaaatataaattaatttaccatcgtgtatttttataacgggattgtccggcatatcatgtagatagttaccgtctacatcgtatactcgaccatctacgcctttaaatcctctatttattgacattaatctattagaattggaataccaaatattagtaccctcaattagtttattggtaatattttttttagacgatagatcgatggctcttgaaaccaaggttttccaaccggactcattgtcgatcggtgagaagtctttttcattagcatgaatccattctaatgatgtatgtttaaacactctaaacaattggacaaattcttttgatttgctttgaatgatttcaaataggtcttcgtctacagtaggcataccattagataatctagccattataaagtgcacgtttacatatctacgttctggaggagtaagaacgtgactattgagacgaatggctcttcctactatctgacgaagagacgcctcgttccatgtcatatctaaaatgaagatatcattaattgagaaaaaactaataccctcgcctccactagaagagaatacgcatgttttaatgcattctccgttagtgtttgattcttggttaaactcagccaccgccttgattctagtatcttttgttctagatgagaactctatattagagataccaaagactttgaaatatagtaataagatttctattcctgactgattaacaaatggttcaaagactagacatttaccatgggatgctaatattcccaaacatacatctataaatttgacgcttttctcttttaattcagtaaatagagagatatcagccgcactagcatcccctttcaatagttctccctttttaaaggtatttaatgcggatttagaaaactctctatctcttaatgaatttttaaaatcattatatagtgttgctatctcttgcgcgtattcgccgggatcacgattttgtctttcaggaaagctatcgaacgtaaacgtagtagccatacgtctcagaattctaaatgatgatataccagtttttatttctgcgagtttagccttttgataaatctcttcttgcttttttgacatattaacgtatcgcattaatactgttttcttagcgaatgatgcagacccttctacgttatcaaaaatagaaaactcgttattaactatgtacgaacataggcctcctagtttggagactaattctttttcatcgactagacgtttattctcaaatagtgattggtgttgtaaggatcctggtcgtagtaagttaaccaacatggtgaattcttgcacactattgacgataggtgtagccgataaacaaatcatcttatggttttttaatgcgatggtcttggataaaaaattatatactgaacgagtaggacggatcttaccatcttctttgattaatgatttagaaatgaagttatgacattcatcaataatgacgcatattctactcttggaattaatagttttgatattagtaaaaaatttatttctaaaattttgatcatcgtaattaataaaaatacaatccttcgttatctctggagcgtatctgagtatagtgttcatccaaggatcttctatcaaagcctttttcaccaataagataatagcccaattcgtataaatatccttaagatgtttgagaatatatacagtagtcattgttttaccgacacccgtttcatggaacaataaaagagaatgcatactgtctaatcctaagaaaactcttgctacaaaatgttgataatccttgaggcgtactacgtccgaccccatcatttcaacgggcatattagtagttctgcgtaaggcataatcgatataggccgcgtgtgatttactcatttatgagtgataagtaataactatgttttaaaaatcacagcagtagtttaactagtcttctctgatgtttgttttcgatactttttgaatcagaagtcatactagaataaagcaacgagtgaacgtaatagagagcttcgtatactctattcgaaaactctaagaacttattaatgaattccgtatccactggattgtttaaaatactaaattgaacactgttcacatccttccaagaagaagacttagtgacggacttaacatgagacataaataaatccaaattttttttacaaacatcactagccaccataatggcgctatctttcaaccagctatcgcttacgcattttagcagtctaacatttttaaagagactacaatatattctcatagtatcgattacacctctaccgaataaagttggaagtttaataatacaatatttttcgtttacaaaatcaaataatggtcgaaacacgtcgaaggttaacatcttataatcgctaatgtatagattgttttcagtgagatgattattagatttaatagcatctcgttcacgtttgaacagtttattgcgtgcgctgaggtcggcaactacggcgtccgctttagtactcctcccataatactttacgctattaatctttaaaatttcatagactttatctagatcgctttctggtaacatgatatcatgtgtaaaaagttttaacatgtcggtcggcattctatttagatcattaactctagaaatctgaagaaagtaattagctccgtattccagactaggtaatgggcttttacctagagacagattaagttctggcaatgtttcataaaatggaagaaggacatgcgttccctcccggatattttttacaatttcatccatttacaactctatagtttgttttcattattattagttattatctcccataatcttggtaatacttaccccttgatcgtaagataccttatacaggtcattacatacaactaccaattgtttttgtacataatagattggatggttgacatccatggtggaataaactactcgaacagatagtttatctttccccctagatacattggccgtaatagttgtcggcctaaagaatatctttggtgtaaagttaaaagttagggttcttgttccattattgctttttgtcagtagttcattataaattctcgagatgggtccgttctctgaatatagaacatcatttccaaatctaacttctagtctagaaataatatcggtcttattcttaaaatctattcccttgatgaagggatcgttaatgaacaaatccttggcctttgattcggctgatctattatctccgttatagacgttacgttgactagtccaaagacttacaggaatagatgtatcgatgatgttgatactatgtgatatgtgagcaaagattgttctcttagtggcatcactatatgttccagtaatggcggaaaactttttagaaatgttatatataaaagaattttttcgtgttccaaacattagcagattagtatgaagataaacactcatattatcaggaacattatcaatttttacatacacatcagcatcttgaatagaaacgataccatcttctggaacctcaacaatctcggcagactccggataaccagtcggtggaccatcgctaacaataactagatcatccaacaatctactcacatatgcatctatataatctttttcatcttgtgagtaccctggatacgaaataaatttattatccgtatttccataataaggtttagtataaacagagagcgatgttgccgcatgaacttcagttacagtcgccgttggttggtttatttgacctattactctcctaggtttctctataaacgatggtttaatttgtacattcttaaccatatatccaataaagctcaattcaggaacataaacaaattctttgttgaacgtttcaaagtcgaacgaagagtcacgaataacgatatcggatactggattgaaggttaccgttacggtaatttttgaatcggatagtttaagactgctgaatgtatcttccacatcaaacggagttttaatataaacgtatactgtagatggttctttaatagtgtcattaggagttaggccaatagaaatatcattaagttcactagaatatccagagtgtttcaaagcaattgtattattgatacaattattatataattcttcgccctcaatttcccaaataacaccgttacacgaagagatagatacgtgattaatacatttatatccaacatatggtacgtaaccgaatcttcccatacctttaacttctggaagttccaaactcagaaccaaatgattaagcgcagtaatatactgatccctaatttcgaagctagcgatagcctgattgtctggaccatcgtttgtcataactccggatagagaaatatattgcggcatatataaagttggaatttgactatcgactgcgaagacattagaccgtttaatagagtcatccccaccgatcaaagaattaatgatagtattattcattttctatttaaaatggaaaaagcttacaataaactccgtagagaaatatctataatttgtgagttttccttaaagtaacagcttccgtaaacgccgtctttatctcttagtaagtttattgtatttataaccttttccttatcttcatagaatactaaaggcaacaaagaaatttttggttcttctctaagagctacgtgagacttaaccatagaagccaacgaatccctacatattttagaacagaaataccctacttcaccacccttgtatgtctcaatactaataggtctaaaaaccaaatcttgattacaaaaccaacacttatcaattacactatttgtcttaatagacacatctgccatagatttataatactttggtagtatacaagcgagtgcttcttctttagcgggcttaaagactgctttaggtgctgaaataaccacatctggaaggcttactcgcttagccatttaattacggaactatttttttatacttctaatgagcaagtagaaaacctctcatctacaaaaacatactcgtgtccataatcctctaccatagttacacgttttttagatctcatatgtgctaaaaagttttcccatactaattggttactattatttttcgtataatttttaacagtttgaggttttagatttttagttacagaagtgatatcgaatattttatccaaaaagaatgaataattaattgtcttagaaggagtgttttcttggcaaaagaataccaagtgcttaaatatttctactacttcattaatcttttctgtactcagattcagtttctcatcttttacttgattgattatttcaaagactaacttataatcctttttatttattctctcgttagccttaagaaaactagatacaaaatttgcatctacatcatccgtggatatttgatttttttccatgatatccaagagttccgagataatttctccagaacattgatgagacaataatctccgcaatacatttctcaaatgaataagtttattagacacgtggaagtttgactttttttgtacctttgtacatttttgaaataccgactcgcaaaaaatacaatattcatatccttgttcagatactataccgttgtgtctacaaccgctacataatcgtagattcatgttaacactctacgtatctcgtcgtccaatattttatataaaaacattttatttctagacgttgccagaaaatcctgtaatacttttagttttttgggctgtgaataaagtatcgccctaatatggttaccgtcctccgccaatatagtagttaaattatccgcacatgcaaaagaacaccgcttaggcggattcagtacaatgttatatttttcgtaccaactcatttaaatatcataatctaaaatagttctgtaatatgtctagcgctaatatattgatcataatcctgtgcataaattaagatacaacaatgtctcgaaatcatcgacatggcttcttccatagttagaagatcgtcgtcaaagttagcaacgtgattcatcaacatttgctgttttgaggcagcaaatactgaaccgtcgccattcaaccattcataaaaaccatcgtctgaatccattgataatttcttgtactggtttttgagagctcgcatcaatctagcatttctagctcccggattgaaaacagaaagaggatcgtacatccagggtccattttctgtaaatagaatcgtataatgtcccttcaagaagatatcagacgatccacaatcaaagaattggtctccgagtttgtaacaaactgcggactttaacctatacatgataccgtttagcataatttctggtgatacgtcaatcggagtatcatctattagagatctaaagccggtgtaacattctccaccaaacatattcttattctgacgtcgttctacataaaacatcattgctccattaacgataacaggggaatgaacagcactacccatcacattagttcccaatggatcaatgtgtgtaactccagaacatcttccatagcctatgttaggaggagcgaacaccactcttccactattgccatcgaatgccatagaataaatatccttggaattgatagaaatcggactgtcggatgttgtgatcatcttcataggattaacaacgatgtatggtgccgcctgaagtttcatatcgtaactgatgccgttcataggtctagccacagaaaccaacgtaggtctaaatccaactatagacaaaatagaagccaatatctgttcctcatctgtcataacttgagagcatccagtatgaataatcttcattagatggggatctaccgcatcatcatcgttacaataaaaaattcccattctaatgttcataattgcttttctaatcatggtatgcatgtttgctctctgaatctctgtggaaattagatctgatacacctgtaatcactatcggattatcctccgtaagacgattaaccaacaacatataattataagactttacttttctaaattcataaagttgctggattaggctataggtgtctccatgtacatacgcgttctcgagcgcaggaagtttaataccgaatagtgccatcagaataggatgaatatagtaattagtttctggttttctataaataaaagacaaatcttgtgaactagacatatcggtaaaatgcatggattggaatcgtgtagtcgacagaagaatatgatgattagatggagagtatattttatctaactctttgagttggtcaccgattctaggactagctcgagaatgaataagtactaaaggatgagtacatttcacagaaacactagcattgttcaatgtgctctttacatgggtaaggagttgaaatagctcgtttctatttgttctgacaatatttagtttattcataatgttaagcatatcctgaatagtaaagttagatgtgtcatacttgttagtagttagatatttagcaattgcattcccatcatttctcaatctcgtactccaatcatgcgtggatgctacttcgtcgatggaaaccatacaatcctttttgataggctgttgagattgattatttcctgcacgtttaggtttggtacgttgatttctagcccctgcggatataaagtcatcgtctacaatttgggacaatgaattgcatacactacaagacaaagatttatcagaagtgtgaatatgatcttcatctaccaaagaaagagtttgattagtataactagattttagtcctgcgttagatgttaaaaaaacatcgctattgaccacggcttccattatttatattcgtagtttttactcgaaagcgtgattttaatatccaatcttattacttttggaatcgttcaaaacctttgactagttgtagaatttgatctattgccctacgcgtatactcccttgcatcatatacgttcgtcaccagatcgtttgtttcggcctgaagttggtgcatatctttttcaacactcgacatgagatccttaagggccatatcgtctagattttgttgagatgctgctcctggatttggattttgttgtgctgttgtacatactgtaccaccagtaggtgtaggagtacatacagtggccacaataggaggttgaggaggtgtaaccgttggagtagtacaagaaatatttccatccgattgttgtgtacatgtagttgttggtaacgtctgagaaggttgggtagatggcggtgtcgtcgtcttttgatctttattaaatttagagataatatcctgaacagcattgctcggcgtcaacgctggaaggagtgaactcgccggcgcatcagtatctgcagacagccaatcaaaaagattagacatatcagatgatgtattagtttgttgtcgtggttttggtgtaggagcagtactactaggtagaagaataggagccgatgtaggtgtcggaaccggctgtggagttatatgaatagttggttgtagcggttggataggctgtctgctggcggccatcatattatctctagctagttgttctcgcaactgtctttgataatacgactcttgagactttagtcctatttcaatcgcttcatcctttttcgtatccggatccttttcttcagaataatagattgacgactttggtgtagaggattctgccagcccctgtgagaacttgttaaagaagtccatttaaggctttaaaattgaattgcgattataagattaaatggcagacacagacgatattatcgactatgaatccgatgatctcactgaatacgaggatgatgaagaagaggaagaagatggagagtcactagaaactagtgatatagatcccaaatcttcttataagattgtagaatcagcatccactcatatagaagatgcgcattccaatcttaaacatatagggaatcatatatctgctcttaaacgacgctatactagacgtataagtctatttgaaatagcgggtataatagcagaaagctataacttgcttcaacgaggaagattacctctagtttcagaattttctgacgaaacgatgaagcaaaatatgctacatgtaattatacaagagatagaggagggttcttgtcctatagtcatcgaaaagaacggagaattgttgtcggtaaacgattttgacaaagatggtctaaaattccatctagactatattatcaaaatttggaaacttcaaaaacgatattagaatttatacgaatatcgttctctaaatgtcacaatcaagtctcgcatgttcagcaatttattgtcgtactttatatcgtgttcattaacgatatcttgcaaaatagtaatgattctatcttccttcgatagatattcttcagagattattgtcttatattctttcttgttatcagatatgaatttgataagactttgaacattattgatacccgtctgtttaattttttctacagatattttagttttggcagattctatcgtatctgtcaatagacatccaacatcgacattcgacgtcaattgtctataaatcaacgtataaattttagaaataacattagcgaattgttgtgcattgatgtcgttattctgaaacagtatgattttaggtagcattttcttaacaaagagaacgtatttattgttactcagttgaacagatgatatatccagattactaacgcatctgattccgtataccaaactttcagaagaaatggtatacaattgtttgtattcattcaatgtctctttttcagaaattagtttagagtcgaatactgcaataattttcaagagatagttttcatcagataagattttatttagtgtagatatgataaaactattgttttgttggagaacttgatacgccgcgttctctgtagtcgacgctctcaaatgggaaacgatctccattatttttttggaatcggatactatatcttcggtatcttgacgcagtctagtatacatagagttaagagagattagagtttgtacattaagcaacatgtctctaaatgtggctacaaacttttccttttccacatcatctagtttattatataccgatttcacaacggcaccagatttaaggaaccagaatgaaaaactctgataactacaatatttcatcatagttacgattttatcatcttctatagttggtgtaatagcgcatacctttttctccaagactggaaccaacgtcataaaaatgtttaaatcaaaatccatatcaacatctgatgcgctaagaccagtctcgcgttcaagattatctttactaatggtgacgaactcatcgtatagaactctaagtttgtccattatttatttacagatttagttgtttaatttatttgtgctcttccagagttgggatagtatttttctaacgtcggtattatattattaggatctacgttcatatgtatcataatattaatcatccacgttttgataaatctatctttagcttctgaaataacgtatttaaacaaaggagaaaaatatttagctacggcatcagacgcaataacattttttgtaaatgtaacgtatttagacgacagatcttcgttaaaaagttttccatctatgtagaatccatcagttgttaacaccattcccgcgtcagattgaataggagtttgaatagtttgttttggaaatagatccttcaataacttatagttgggtgggaaaaaatcgattttatcactagactctttcttttttactatcattacctcatgaactatttcttgaatgagtatatgtattttctttcctatatcggacgcgttcattggaaaatataccatgtcgttaactataagaatatttttatcctcgtttacaaactgaataatatcagatgtagttcgtaaacgaactatatcatcaccagcacaacatctaactatatgatatccactagtttcctttagtcgtttattatcttgttccatattagcagtcattccatcatttaagaaggcgtcaaagataatagggagaaatgacattttggattctgttacaactttaccaaaattaaggatatacggacttactatctttttctcaacgtcaatttgatgaacacacgatgaaaatgtacttcgatgagattgatcatgtagaaaacaacaagggatacaatatttccgcatatcatgaaatatattaagaaatcccaccttattatatttccccaaaggatccatgcacgtaaacattatgccgttatcattaataaagacttctttctcatcggatctgtaaaagttgttactgatttttttcattccaggatctagataattaataatgatgggttttctattcttattctttgtattttggcatatcctagaccagtaaacagtttccactttggtaaaatcagcagacttttgaacgctattaaacatggcattaatggcaataactaaaaatgtaaaatatttttctatgttaggaatatggtttttcactttaatagatatatggtttttggccaaaatgatagatatttttttatccgaggatagtaaaatattattagtcgccgtctctataaaaatgaagctagtctcgatatccaattttattctagaattgataggagtcgccaaatgtaccttatacgttatatctcccttgatgcgttccatttgtgtatctatatcggacacaagatctgtaaatagttttacgttattaatcatcacggtatcgccgtcgctagataatgctaatgtaccatccaagtcccaaatggagagatttaactgttcatcgtttagaataaaatgattaccggtcatattaataaagtgttcatcgtatctagataacaacgacttataattaatgtccaagtcttgaactcgctgaatgatcttttttaacccagttagttttagattggtacgaaatatattgttaaactttgattctacagtaatgtccaaatctagttgtggaaatacttccatcaacattgtttcaaacttgataatattattatctacatcttcatacgatccaaattccggaatagatgtatcacatgctcttgccacccagataaccaaaaagtcacacgctccaggatatacattgtataaaaagctatcgtttttaagtagggtttttttctgcgtgtatacgaagggattaaaaatagtattatcaacgtaactatattccaaattattcttatgagaatagataataatatcgtccttaatatctaacaaatttcctaaatatccctttaattgagtcattcgaagcgtcaatagaatatgtctcttaactatttccggctgttgtatatttaaatgacttcgtaaaaaataatatatgggcgacttctcatctatgtaatcatatggagtgagatatagggctcgttctacctcctgccccttacccacctgtaataccaattgcggacttactatatatcgcatatttatatcgtggggtaaagtgaaaatctactaccgatgatgtaagtcttacaatgttcgaaccagtaccagatcttaatttggaggcctccgtagaactaggggaggtaaatatagatcaaacaacacctatgataaaggaaaatagcggttttatatcccgtagtagacgtctattcgcccatagatctaaggatgatgagagaaaactagcactacgattctttttacaaagactttattttttagatcatagagagattcattatttgttcagatgcgttgacgctgtaaaagacgtcactattaccaaaaaaaataacattatcgtggcgccttatatagcacttttaactatcgcatcaaaaggatgcaaacttacagaaacaatgattgaagcattctttccagaactatataatgaacatagtaagaaatttaaattcaactctcaagtatccatcatccaagaaaaactcggataccagtttggaaactatcacgtttatgattttgaaccgtattactctacagtagctctggctattcgagatgaacattcatctggcatttttaatatccgtcaagagagttatctggtaagttcattatctgaaataacatatagattttatctaattaatctaaaatctgatcttgttcaatggagtgctagtacgggcgctgtaattaatcaaatggtaaatactgtattgattacagtgtatgaaaagttacaactggtcatagaaaatgattcacaatttacatgttcattggctgtggaatcagaacttccaataaaattacttaaagatagaaatgaattatttacaaaattcatcaacgagttaaaaaagaccagttcattcaagataagcaaacgcgataaggatacgctactaaaatattttacttaggactggagttagaatttatagacgactcatttcgtttatcattattactaccatcattattagtattcttcttgttatcttgttcagaaatatacagcaatgctatgcctaatactaaatacattatcatgcttgcaatggctctaacaacgacgaaccaaaatgaatttggtcgtagcttttgttcacaaaaatacataaagaaatgtctacataaatctatggcgccattggctacttgaaatagcgccagtcctcctacagattttaatatagctgtataacatgacatttattcatcatcaaaagagacagagtcaccatctgtcatatttagattttttttcatgtgttcaaagtatcctctactcatttcattataatagtttatcatacttagaattttaggacggatcaatgagtaagacttgactagatcgtcagtagtaatttgtgcatcgtctattctgcatccgcttcgtcgaataatgtatagcatcgctttgagattctccatagctatcaagtctttatacaatgacatggaaatatctgtgaatactttatacttctccaacatcgatgccttaacatcatcgcctactttagcattgaaaatacgttctattgtgtagatggatgtagcaagatttttaaacaacaatgccatcttacacgatgattgcctcaagtctccaatcgtttgtttagaacgattagctacagagttcaacgcttggctgactagcatattattatctttagaaattgtattcttcaatgaagcgtttatcatatctgtgatttcgttagtcatattacagtctgactgggttgtaatgttatccaacatatcacctatggatacggtacacgtaccagcatttgtaataatcctatctaagatgttgtatggcattgcgcagaaaatatcttctcctgtaatatctccactctcgataaatctactcagattattcttaaatgccttattctctggagaaaagatatcagtgtccatcatttcattaatagtatacgcagaaaagataccacgagtatcaattctatccaagatacttatcggttccgagtcacagataatggtttcctctccttcgggagatcctgcatagaaatatctaggacaatagtttctatactgtctgtaactctgataatctctaaagtcactaactgataccatgaaattgagaagatcaaacgctgaagtaatcaatttttctgcctcgtttttactacaactagttttcatcaatgtagtgacgatgtattgtttagttactcttggtctaatactgatgatagagatattattacttcccataatggatcttctagtagtcaccttaaagcccattgatgcaaatagcagatagataaagtcttggtatgactcctttctaatatagtacggactacctttgtcacccaactttatacccacataagccataacaacctctttaatagccgtttcatgaggtttatcagccatgagcctgagtagttggaagaatctcatgaatcccgtctcagaaagtcctatatgcatgatagatttatctttcctgggaaactctcgtatagtcatagatgaaatactcttcaaagtttctgaaataagattagtaacagtcttacctccgactactctgggtaacaaacatactctaataggtgttttctctgcggagataatatcagaaaggatagagcaataagtagtattattgtgattataaagaccgaatacataacaggtagaatttataaacatcatgtcctgaaggtttttagacttgtattcctcgtaatccataccgtcccaaaacatggatttggtaactttgatagccgtagatctttgttccttcgccaacaggttaaagaaattaataaagaatttgttgtttctatttatgtccacaaattgcacgtttggaagcgtaactgttacgttcactgcagcattttgaggatcgcgagtatgaagtacgatgttattgtttactggtatatctggaaagaaatctaccagtctaggaataagagattgatatcgcatagaaatagtaaagtttataatctcatcatcgaagagcattttgttaccattgtaataaatatccactctgtcatatgtataaatgaagtactgttcaaacatgatgagatgtttatatgttggcatagtagtgagatcgacgtttggtaatggcaatgtattaagattaactccataatgtctagcagcatctgcgatgttataagtgtcgtcaaagcggggtcgatcttgtgctgttatatattgtctaacacctataagattatcaaaatcttgtctgcttaatacaccgttaacaatttttgccttgaattcttttattggtgcattaataacatccttatagaggatgttaaacaaataagtgttatcaaagttaagatctggatatttcttttctgctagaacatccattgagtcggagccatctggtttaatataaccaccgataaatctagctctgtattctgtatccgtcaatctaatattaagaaggtgttgagtgaaaggtggaagatcgtaaaagctgtgagtattaatgataggattagtttccgaactaatgttaattggggtattaataatatctatatttccagcgttaagtgtaacattaaacagttttaattcacgtgacgtggtatcaattaaataattaatgcccaatttggatatagcagcctgaagctcatcttgtttagttacggatcctaatgagttattaagcaatatatcgaacggatgaacgaaggttgttttaagttggtcacatactttgtaatctagacatagatgcggaagaacggtagaaactatacgaaataaatattcagagtcctctaattgatcaagagtaactattgacttaataggcatcatttatttagtattaaatgacgaccgtaccagtgacggatatacaaaacgatttaattacagagttttcagaagataattatccatctaacaaaaattatgaaataactcttcgtcaaatgtctattctaactcacgttaacaacgtggtagatagagaacataatgccgccgtagtgtcatctccagaggaaatatcctcacaacttaatgaagatctatttccagatgatgattcaccggccactattatcgaacgagtacaacctcatactactattattgacgatactccacctcctacttttcgtagagagttattaatatcggaacaacgtcaacaacgagaaaaaagatttaatattacagtatcgaaaaatgctgaagcaataatggaatctagatctatgataacttctatgccaacacaaacaccatccttgggagtagtttatgataaagataaaagaattcagatgttagaggatgaagtggttaatcttagaaatcaacgatctaatacaaaatcatctgataatttagataattttaccaaaatactatttggtaagactccgtataaatcaacagaagttaataagcgtatagccatcgttaattatgcaaatttgaacgggtcccccttatcagttgaggacttggatgtttgttcggaggatgaaatagatagaatctataaaacgattaaacaatatcacgaaagtagaaaacgaaaaattatcgtcactaacgtgattattattgtcataaacattatcgagcaggcattgctaaaactcggatttgaagaaatcaaaggactgagtaccgatatcacttcagaaattatcgatgtggagatcggagatgactgcgatgctgtagcatctaaactaggaatcggtaacagtccggttcttaatattgtattgtttatactcaagatattcgttaaacgaattaaaattatttaatttaatacattcccatatccagacaacaatcgtctggattaatctgttcctgtcgtctcataccggacgacatattaatctttttattagtaggcatctttttagatggtttctttttcccagcattaactgagtcgatacctagaagatcgtgattgatctctccgaccattccacgaacttctaattggccgtctctgacggtaccataaactattttaccagcattagtaacagcttggacaatctgaccatccattgcgttgaatgatgtagttgctgttgttctacgtttaggagcaccagaagtatttttggagcccttggaggctgatgtagaagaagacgaggattttgatttacatgtaatacattttgtactctttgattttgtatcacatgcgccggcagtcacatttgtttgagaattaagattattgttgcctcctttgacggctgcatctccaccgatttgcgctagtagatttttaagctgtggtgtaatcttattaactgtttcgatataatcatcgtaactgcttctaacggctaaattttttttatccgccatttagaagctaaaaatatttttatttatgcagaagatttaactagattatacaatgaactaatatgatccttttccagattatttacaaacttggtattttttggttctggaggaggcgaatttaaattcggacttggattcggattttgtgagttcttgatcttattatacatcgagtataggatggcgacggtaactgctacgcaaataccgatcaacaaaagaataccaatcatttattgacaataacttcactattgatcaagtatgcaatatatcatcttttcactaaataagtagtaataatgattcaacaatgtcgagatatatggacgataataatttagttcatggaaatatcgctatgattggtatgaatgactccgctaactctgtggggtgcgcagtgctttccccacatagaataaattagcattccgactgtgataataataccaagtataaacgccataatactcaatactttccatgtacgagtgggactggtagacttactaaagtcaataaaggcgaagatacacgaaagaatcaaaagaatgattccagcgattagcacgccggaaaaataatttccaatcataagcatcatgtccatttaactaataaaaattttaaatcgccgaatgaacaaagtggaatataaaccatataaaaacaatagtttgtactgcaaaaataatatctatttttgttttcgaagatatggtaaaattaaatagtagtacacagcatgttataactaacagcagcaacggctcgtaattacttatcatttactagacgaaaaggtggtgggatattttcttgctcaaataatacgaatatatcacccatccattttatgcgatgtttatatactctaatctttaatagatctatagacgacgggtttaccaacaatatagattttatcgattcatctaatttaaacccttccttaaacgtgaatgatctattatctggcataacgatgactctacctgatgaatcggacaatgtactgggccatgtagaataaattatcaacgaattatcgtctacgaacatttatatcatttgttttaattttaggacgcgaataaatggatataaaatagaaaataacagatattacaaccaatgttatggccgcgcccaaccaggtaggcagttttattttatcttttactacaggttctcctggatgtacgtcaccaacggcggacgtagttctagtacaattagacgtaagttctgcttgggaattttttaacgctaaagagttaacgttaatcgtgcacccaacgtatttacatctagttctttgaacatcttgattataatataaccattttctatctctagattcgtcggtgcactcatgtaaccaacataccctaggtcctaaatatttatctccggaattagattttggataattcgcgcaccaacaatttctatttcctttatgatcgttacaaaagacgtataatgccgtatccccaaaagtaaaataatcaggacgaataattctaataaactcagaacaatatctcgcatccatatgtttggagcaaatatcggaataagtagacatagccggtttccgttttgcacgtaaccattctaaacaattggggtttccaggatcgtttctacaaaatccagtcatgaaatcatcacaatgttctgtcttgtaattattattaaatatttttggacagtgtttggtatttgtcttagaacaacattttgccacgctatcactatcgcccaggagataatccttttttataaaatgacatcgttgcccggatgctatataatcagtggcgtgttttaaatccttaatatattcaggagttacctcgttctgataatagattaatgatccaggacgaaatttgaaagaactacatggttctccatgaattaatacatattgtttagcaaattcaggaactataaaactactacaatgatctatcgacataccatctatcaaacaaaacttgggtttaatttctcccggagatgtttcataatagtacgtataactttcttctgcaaacttaacagctctattatattcaggataattaaaacctaattccatatatttgtctcgtatatctgctattcctggtgctattttaattctattaagagtaacggctgcccccattcttaataatcgtcagtatttaaactgttaaatgttggtatatcaacatctaccttatttcccgcagtataaggtttgttgcaggtatactgttcaggaatggttacatttatacttcttctatagtcctgtctttcgatgttcatcacatatgcaaagaacagaataaacaaaataatgtaagaaataatattaaatatctgtgaattcgtaaatacattgattgccataataattacagcagctacaatacatacaatagacattcccacagtgttgccattacctccacgatacatttgagttactaagcaataggtaataactaagctagtaagaggcaatagaaaagatgagataaatatcatcaatatagagattagaggagggctatatagagccaagacgaacaaaatcaaaccgagtaacgttctaacatcattatttttgaagattcccaaataatcattcattcctccataatcgttttgcattatacctccatctttaggcataaacgattgctgctgttcctctgtaaataaatctttatcaagcactccagcacccgcagagaagtcgtcaagcatattgtaatatcttaaataactcatttatatattaaaaaatgtcactattaaagatggagtataatctttatgccgaactaaaaaaaatgacttgtggtcaacccctaagtctttttaacgaagacggggatttcgtagaagttgaaccgggatcatcctttaagtttctgatacctaagggattttacgcctctccttccgtaaagacgagtctagtattcgagacattaacaacgaccgataataaaatcactagtatcaatccaacaaatgcgccaaagttatatcctcttcaacgcaaagtcgtatctgaagtagtttctaatatgaggaaaatgatcgaatcaaaacgtcctctatacattactcttcacttggcgtgtggatttggtaagactattaccacgtgttatcttatggctacacacggtagaaaaaccgtcatttgcgtacccaataaaatgttaatacatcaatggaagacacaggtagaggcagtcggattggaacataagatatctatagatggagtaagtagtctattaaaggaactaaagactcaaagtccggatgtattaatagtagtcagtagacatctgacaaacgatgccttttgtaaatatatcaataagcattatgatttgttcatcttggatgaatcacatacgtataatctgatgaacaatacagcagttacaagatttttagcgtattatcctccgatgatgtgttattttttaactgctacacctagaccagctaaccgaatttattgtaacagtattattaatattgccaagttatccgatctaaaaaaaactatctatgcggtagatagtttttttgagccatattccacagacaatattagacatatggtaaaacgactagatggaccatctaataaatatcatatatatactgagaagttattatctgtagacgagcctagaaatcaacttattcttgataccctggtagaagaattcaagtcaggaactattaatcgaattttagttattactaaactacgtgaacatatggtattcttctacaaacgattattagattttttcggatcagaggttgtatttataggagacgcccaaaatagacgtactccagatatggtcaaatcaatcaaggaactaaatagatttatattcgtatccaccttattttattccggtactggtttagatattcctagtttggattcgttgttcatttgctcggcagtaatcaacaatatgcaaatagagcaattactagggagggtatgtcgagaaacagaactattagataggacggtatatgtatttcctaacacatccatcaaagaaataaagtacatgataggaaatttcatgcaacgaattattagtctgtctgtagataaactaggatttaaacaaaaaagttatcggaaacatcaagaatccgatcccacttctgtatgtacaacatcctccagagaagaacgtgtattaaatagaatatttaactcgcaaaatcgttaagaagtttaagcgacgatccgcatgctgcgcaggccagtgtattacccctcatagtattaatataatccaatgatacttttgtgatgtcggaaatcttaaccaatttagactgacaggcagaacacgtcatgcaatcatcatcgtcatcgataactgtagtcttgggcttctttttgcggctcttcattccggaacgcacattggtgctatccatttaggtagtaaaaaataagtcagaatatgccctatagcacgatcgtgcaaaacctggtatatcgtctctatctttatcacaatatagtgtatcgacatttttattattattgacctcgtttatcttggaacatggaatgggaacatttttgttatcaacggccatctttgccttaattccagatgttgtaaaattataactaaacagtctatcatcgacacaaatgaaattcttgtttagacgtttgtagtttacgtatgcggctcgttcgcgtctcattttttcagatattgcaggtactataatattaaaaataagaatgaaataacataggattaaaaataaagttatcatgacttctagcgctgatttaactaacttaaaagaattacttagtctgtacaaaagtttgaaattttcagattctgcggctatagaaaagtataattctttggtagaatggggaacatctacttactggaaaataggcgtgcaaaaggtagctaatgtcgagacgtcaatatctgattattatgatgaggtaaaaaataaaccgtttaatattgatccgggatattacattttcttaccggtatattttggaagcgtctttatttattcgaagggtaaaaatatggtagaacttggatctggaaactcttttcaaataccagatgatatgcgaagtgcgtgtaacaaagtattagacagcgataacggaatagactttctgagatttgttttgttaaacaatagatggataatggaagatgctatatcaaaatatcagtctccagttaatatatttaaactagctagtgagtacggattaaacatacccaaatatttagaaattgaaatagaggaagacacattatttgacgacgagttatactctattatagaacgctctttcgatgataaatttccaaaaatatccatatcgtatattaagttgggagaacttagacggcaagttgtagactttttcaaattctcgttcatgtatattgagtccatcaaggtagatcgtataggagataatatttttattcctagcgttataacaaaatcaggaaaaaagatattagtaaaagatgtagaccatttaatacgatccaaggttagagaacatacatttgtaaaagtaaaaaagaaaaacacattttccattttatacgactatgatggaaacggaacagaaactagaggagaagtaataaaacgaattatagacactataggacgagactattatgttaacggaaagtatttctctaaggttggtagtgcaggcttaaagcaattgactaataaattagatattaatgagtgcgcaactgtcgatgagttagttgatgagattaataaatccggaactgtaaaacgaaaaataaaaaaccaatcagcatttgatttaagcagagaatgtttgggatatccagaagcggattttataacgttagttaataacatgcggttcaaaatagaaaattgtaaggttgtaaatttcaatattgaaaatactaattgtttaaataacccgagtattgaaactatatatggaaactttaaccagttcgtctcaatctttaatatcgtcaccgatgtcaaaaaaagattattcgagtgaaataatatgcgcctttgatataggtgcaaaaaatcctgccagaactgttttagaagtcaaggataactccgttagggtattggatatatcaaaattagactggagttctgattgggaaaggcgcatagctaaagatttgtcacaatatgaatacactacagttcttctagaacgtcagcctagaaggtcgccgtacgtcaaatttatctattttattaaaggctttttatatcatacatcggctgccaaagttatttgcgtctcgcctgtcatgtctggtaattcatatagagatcgaaaaaagagatcggtcgaagcatttcttgattggatggacacattcggattgcgagactccgttccggatagacgcaaattagacgatgtagcggatagtttcaatttggctatgagatacgtattagataaatggaatactaattatacaccttataataggtgtaaatctagaaattacataaaaaaaatgtaataacgttagtaacgccattatggataatctatttacctttctacatgaaatagaagatagatatgccagaactatttttaactttcatctaataagttgcgatgaaataggagatatatatggtcttatgaaagaacgcatttcctcagaggatatgtttgataatatagtgtataataaagatatacatcatgccattaagaaactagtgtattgcgacatccaacttactaaacacattattaatcagaatacgtatccggtatttaacgattcttcacaagtgaaatgttgtcattatttcgacataaactcagataatagcaatattagctctcgtacagtagagatatttgagagggaaaagtcatctcttgtatcatatattaaaactaccaataagaagagaaaggtcaattacggcgaaataaagaaaactgttcatggaggcactaatgcaaattacttttccggtaaaaagtctgacgagtatctgagtactacagttagatccaacattaatcaaccttggatcaaaaccatctctaagaggatgagagttgatatcattaatcactctatagtaacgcgtggaaaaagctctatattacaaactatagaaattatttttactaatagaacatgtgtgaaaatattcaaggattctactatgcacattattctatccaaggacaaggatgaaaaggggtgtatacacatgattgacaaattattctatgtctattataatttatttctgttgttcgaggatatcatccaaaacgagtactttaaagaagtagctaatgttgtaaaccacgtacttacggctacggcattagatgagaaattattcctaattaagaaaatggctgaacacgatgtttatggagttagcaatttcaaaatagggatgtttaacctgacatttattaagtcgttggatcataccgttttcccctctctgttagatgaggatagcaaaataaagttttttaaggggaaaaagctcaatattgtagcattacgatctctggaggattgtataaattacgtgactaaatccgagaatatgatagaaatgatgaaggaaagatcgactattttaaatagcatagatatagaaacggaatcggtagatcgtctaaaagaattgcttctaaaatgaaaaaaaacactgattcagaaatggatcaacgactcggatataagtttttggtgcctgatcctaaagccggagttttttatagaccgttacatttccaatatgtatcgtattctaattttatattgcatcgattgcatgaaatcttgaccgtcaagcggccactcttatcgtttaagaataatacagaacgaattatgatagaaattagcaatgttaaagtgactcctccagattactcacctataatcgcgagtattaaaggtaagagttatgacgcattagccacgttcactgtaaatatctttaaagaggtaatgaccaaagagggtatatccatcactaaaataagtagttatgagggaaaagattctcatttgataaaaattccgctactaataggatacgggaataaaaatccacttgatacagccaagtatcttgttcctaatgtcataggtggagtctttatcaataaacaatctgtcgaaaaagtaggaattaatctagtagaaaagattacaacatggccaaaatttagggttgttaagccaaactcattcactttctcgttttcctccgtatcccctcctaatgtattaccgacaagatatcgccattacaagatatctctggatatatcacaattggaagcgtcgaatatatcatcgacaaagacatttataacggtcaatattgttttgctgtctcaatatttatctagagtgagtctagaattcattagacgtagcttatcatacgatatgcctccagaagttgtctatctagtaaacgcgataatagatagtgctaaacgaattactgaatctattactgactttaatattgatacatacattaatgacctggtggaagctgaacacattaaacaaaaatctcagttaacgatcaacgagttcaaatatgaaatgctgcataactttttacctcatatgaactatacacccgatcaactaaagggattttatatgatatctttactaagaaagtttctctactgtatctaccacacttctagatatccagatagagattcgatggtttgtcatcgtatactaacatacggcaaatattttgagacgttggcacatgatgaattagagaattacataggcaacatccgaaacgatatcatgaacaatcacaagaacagaggcacttacgcggtaaacattcatgtactaacaactcctggacttaatcatgcattttctagtctattgagtggaaagttcaaaaagtcagacggtagttatcgaacacatcctcactattcatggatgcagaatatttctattcctaggagtgttggattttatccggatcaagtaaagatttcaaagatgttttctgtcagaaaataccatccaagtcaatatctttacttttgttcatcagacgttccggaaagaggtcctcaggtaggtttagtatctcaattgtctgtcttgagttccattacaaatatactaacgtctgagtatttggatttggaaaagaaaatttgtgagtatatcagatcatattataaagatgatataagttactttgaaacaggatttccaatcactatagaaaatgctctagtcgcatctcttaatccaaatatgatatgtgattttgtaactgactttagacgtagaaaacggatgggattcttcggtaacttggaggtaggtattactttagttagggatcacatgaatgaaattcgcattaatattggagcgggaagattagtcagaccattcttggttgtggataacggagagctcatgatggatgtgtgtccggagttagaaagcagattagacgacatgacattctctgacattcagaaagagtttccgcatgtcatcgaaatggtagatatagaacaatttacttttagtaacgtatgtgaatcggttcaaaaatttagaatgatgtcaaaggatgaaagaaagcaatacgatttatgtgactttcctgccgaatttagagatggatatgtggcatcttcattagtgggaatcaatcacaattctggacccagagctattcttggatgtgctcaagctaaacaagctatctcttgtctgagctcggatatacgaaataaaatagacaatggaattcatttgatgtatccagagaggccaatcgtgattagtaaggctttagaaacttcaaagattgcggctaattgcttcggccaacatgttactatagcattaatgtcgtacaaaggtatcaatcaagaggatggaattatcatcaaaaaacaatttattcagagaggcggtctcgatattgttacagccaagaaacatcaagtagaaattccattggaaaactttaataacaaagaaagagataggtctaacgcctattcaaaattagaaagtaatggattagttagactgaatgctttcttggaatccggagacgctatggcacgaaatatctcatcaagaactcttgaagatgattttgctagagataatcagattagcttcgatgtttccgagaaatataccgatatgtacaaatctcgcgttgaacgagtacaagtagaacttactgacaaagttaaggtacgagtattaaccatgaaagaaagaagacccattctaggagacaaatttaccactagaacgagtcaaaagggaacagtcgcgtatgtcgcggatgaaacggaacttccatacgacgaaaatggtatcacaccagatgtcattattaattctacatccatcttctctagaaaaactatatctatgttgatagaggttattttaacagccgcatattctgctaagccgtacaacaataagggagaaaaccgacctgtctgttttcctagtagtaacgaaacatccatcgatacatatatgcaattcgctaaacaatgttatgagcattcaaatccgaaattgtctgatgaagaattatcggataaaatcttttgtgaaaagattctctatgatcctgaaacggataagccttatgcatccaaagtattttttggaccaatttattacttgcgtctgagacatttaactcaggacaaggcaaccgttagatgtagaggtaaaaagacgaagctcattagacaggcgaatgagggacgaaaacgtggaggaggtatcaagttcggagaaatggagagagactgtttaatagcgcatggtgcagccaatactattacagaagttttgaaagattcggaagaagattatcaagatgtgtatgtttgtgaaaattgtggagacatagcagcacaaatcaagggtattaatacatgtcttagatgttcaaaacttaatctctctcctctcttaacaaaaattgataccacacacgtatctaaagtatttcttactcaaatgaacgccagaggcgtaaaagtcaaattagatttcgaacgaagacctccttcgttttataaaccattagataaagttgatctcaaaccgtcttttctggtctaatattgtttagtagatacttatcaacatcatcaagattatcaagattatcaagattatcaagataagctaattcactaaacacattatcgatttcggtatcgttactcgcagaataaagttcgttatgatcctgatattcggaaatctgtggagtttcaggttttggtggatgtgtaacagctacttgagataccgaagtctgatattcagaaagctgtggatgttctggttcggcatccaccgatggtgttacaccactactaattggttcagtaacgtctgtggacgatggaggcaccacttctacaggttctggttctttatcctcagtcatcaacggagctacttcaatgcgaggaaatgtataatttggtaatggtttctcatgtggatctgaagaagaggtaagatatctactagaaagataccgatcacgttctagttctcttttgtagaacttaactttttctttctcagcatctagttgatattccaacctcttcacgttactacgttcagatttcaattcacgttcgcatgggttacctccgcagtttttacgagcgatttcacgttcagccttcatgcgtctctccctctctctatcgagtttatcagagcagtctttctgaaggcgatcgaactccataaatttctccaacgctttgattgtttccatagatttccgaagttcagcttttaggactgtgattctttttctttcgaattcacagctggatgtacaaccgtttccattaccgccatctctaagtttcttttctagatcggcaacatttcatccccatgccttttacattcctcgagtctactgtcgtcgaaatatcgttccagctccttttcgacatcaataactttagcacgttgtctctcaagctctcttttgtagttatctgattccctggcacgtttaagatcttcatgcaattgagtcagctcttaacacaatctcttgcttcttcgtcatagtacgcgcaatcactgtgagatccattgttaccacgtctacactcggcgagctcgcgtttaagagattcaatttcccgtttgtattggtccatgtttccattgctaccaccattagatttacaggctgctagttgtcgttcgagatcagaaatacgggttttcttggaattgatttcgtcgatgtacttggcatcgaaacacttattaagttctttttccaattctacgattttatttctttcgcgagtcaattccctcctgtagtaactatctgttttgtcagattcacgctctctacgtagactttcttgcaagttactaatttgttccctagcacgtccgagtttagttttatatgctgaatagagttctgattcatcctttgagcagatctctagcgatcgtttaagattcctgattctagtctttagcctatttacctcctcagaagatgttccgttaccgttgcgtttacactcgttaagctgtctatcaagatccatgattctatctctaagacgttgcatctctctttccatatcagcattgctttcattattacgtctgcagtcactcaactgtctttcaatatctgagattctatctctaagacgtcgcatctctctctgtttcggcattggtttcattattacgtctacagtcgttcaactgtctttcaagatctgatattctagattggagtctgctaatctctgtagcattttcacggcattcactcagttgtctttcaagatctgaaattttagattggagtctgctaatctctgtaagatttcctcctccgctctcgatgcagtcggtcaacttattctctagttctctaatacgcgaacgcagtgcatcaacttcttgcgtgtcttcctggttgcgtgtacattcatcgagtctagattcgagatctctaacgcgtcgtcgttcttcctcaagttctctgcgtactacagaaagcgtgtccctatcttgttgatatttagcaatttctgattctagagtactgattttgcttacgtagttactaatatttgtcttggccttatcaagatcctccttgtatttgtcgcattccttgatatccctacgaagtctggacagttcccattcgacattacgacgtttatcgatttcagctcggagatcgtcatcgcgttgttttagccacatacgactgagttcaagttctcgttgacaagatccatctacttttccattcctaatagtatccagttccttttctagttctgaacgcatttctcgttccctatcaagcgattctctcaattctcggatagtcttcttatcaatttctaataaatctgaaccatcatctgtcccattttgaatatccctgtgttctttgatctcttttgtaagtcggtcgattctttcggttttataaacagaatccctttccaaagtcctaatcttactgagtttatcactaagttctgcattcaattcggtgagttttctcttggcttcttccaactctgttttaaactctccactatttccgcattcttcctcgcatttatctaaccattcaattagtttattaataactagttggtaatcagcgattcctatagccgttcttgtaattgtgggaacataattaggatcttctaatggattgtatggcttgatagcatcatctttatcattattagggggatggacaaccttaattggttggtcctcatctcctccagtagcgtgtggttcttcaatagccgtgttagtaataggcttaggcaaatgcttgtcgtacgcgggcacttcctcatccatcaagtatttataatcgggttctacgtctgaatattcttttctaagagacgcaacttctggagttagtagaagaactctgtttctatatctatcaacgctggaatcaatactcaagttaaggatagcgaatacctcatcgtcatcatccgtatcctctgaaacgccatcatatgacatttcatgaagtctaacgtattgataaacagaatcagatttagtattaaacagatccttaacctttttagtaaatgcatatgtatattttagatctccagatttcataatatggtcgcatgccttaaatgtcagtgcttccataatatagtctggaacactaattggtgatgaaaaagataccggaccatatgctacgttgataaataactctgagccactaactagataatgattaatgttaaggaagaggaaatattcagtgtataggtatgtcttggcgtcatatcttgtactaaacacgctaaacagtttgttaatgtgatcaatttccaatagattaattagagcagcaggaataccaacaaacatattaccacatccgtattttctatgaatatcacatatcatgttaaaaaatcttgatagaagagcgaatatctcgtctgacttaatgagtcgtagttcagcagcaacataagtcataactgtaaatagaacatactttcctgtagtgttgattctagactccacatcaacaccattattaaaaatagttttatatacatctttaatctgctctccgttaatcgtcgaacgttctagtatacggaaacactttgatttcttatctgtagttaatgacttagtgatatcacgaagaatattacgaattacatttcttgtttttcttgagagacctgattcagaactcaactcatcgttccatagtttttttacctcagtggcgaaatctttggagtgcttggtacatttttcaataaggttcgtgacctccatttattataaaaaaattttattcaaaacttaactacaatcgggtaattataaaatcgtagatctcccatgtggtggaatactaccatctatcgcatgtggatggacagtaggtaatggccatgggaacagtaatgtttgcatatttatctttcttgccagtattactgcatattgtcccaatgtttcgatgtgatgttctaacctatcaactgccgctgtatcacaacaatagtgtccgatgaaattaagattatgatccaatgtgtttaatatatgattatcaagtcttatacgatccgcgtcttttttgacaggatcaggttcttctacaggaagaagtttcggcctcttatgatattcatgtctgggaaacggtggtctagggtgaggctccggtatcggagtgggttttggattataatcatcatcgtctatgacatcatcttcgacttcgatatttattttgctatcttgatgatgtcctgtatcagttgcattttcagcactcgactgaatattagcgcattcattgtttattattaccatatttctaaacccaaaatgtatatgttgaacatcagtactatcgttgatgagtcttatagcatgaattcgcttatcgttatcgggtttagcttctgtcaccttagcaattccttttttattaaactctacataatcatatccatttctattgtttgttctaatataaacgagtatagcatcattgctaaatttttcaatagtatcgaaaacagaatatcctaaaccatataatatatattcaggaacactcaaactaaatgtccaggattctcctaaatacgtaaactttaatagtgcgaaatcattcaaaaatctaccacttatagatagatagtacataaatgcgtatagtagtctacctatctctttattatgaaaaccggcattacgatcatatatgtcgtgatatacctgtgatccgtttacgttaaaccataaatacatgggtgatcctataaacatgaatttatttctaattctcagagctatagttaattgaccgtgtaatatttgcttacatgcatacttgatacgctcattaataagatttttatcattgctcgttatctcagaatcgtatatataaggagtaccatcgtgattcttaccagatattatacaaaatactatatataaaatatattgaccaacgttagtaatcatataaatgtttaacgttttaaattttgtattcaatgatccattatcatacgctagcatggtcttatgatattcattctttaaaatataatattgtgttagccattgcattggggctcctaatggagattttttattctcatccattttaggataggctttcataaagtccctaataacttcgtgaataatgtttctatgttttctactgatgcatgtatttgcttcgatttttttatcccatgtttcatctatcatagatttaaacgcagtaatgctcgcaacattaacatcttgaaccgttggtacaattccgttccataaatttataatgttcgccatttatataactcattttttgaatatacttttaattaacaaaagagttaagttactcatatggacgccgtccagtctgaacatcaatctttttagccagagatatcatagccgctcttagagtttcagcgtgattttccaacctaaatagaacttcatcgttgcgtttacaacacttttctatttgttcaaactttgttgttacattagtaatctttttttccaaattagttagccgttgtttgagagtttcctcattgtcgtcttcatcggctttaacaattgcttcgcgtttagcctctggctttttagcagcctttgtagaaaaaaattcagttgctggaattgcaagatcgtcatctccggggaaaagagttccgtccatttaaagtacagattttagaaactgacactctgcgttatttatatttggtacaacacatggattataaatattgatgttaataacatcagaaaatgtaaagtctatacattgttgcatcgtgttaaattttctaatggatctagtattattgggtccaacttctgcctgaaatccaaatatggaagcggatacaaaaccgtttcctggataaaccacacatctccacttttgctttacatcagaaattgtgtcattgacatcttgaactctcctatctaatgccggtgttccacctatagattttgaatattcgaatgctgcatgagtagcattaaattccttaatattgccataattttcatatattgagtaaccctggataaaaagtaaacacaccgcagccgtcgctaccacaataaaaaaaattgatagagagttcatttataatctattagaagctgacaaaatttttttacacgcatcagacaatgctttaataaatagttcaacatctacttttgtcatatcgaaccgatggtatgattctaacctagaattacatccgaaaaagttgactatgttcatagtcattaagtcattaacaaacaacattccagactctggattataagacgatactgtttcgtcacaattacctaccttaatcatgtgattatgaatattggctattagagcaccttctaagaaatctataatatctttgaaacacgatttaaaatcaaaccacgaatatacttctacgaagaaagttagtttacccataggagaaataactataaatggagatctaaatacaaaatccggatctatgatagttttaacattattatattctctattaaatacctccacatctaaaaatgttaattttgaaactatgtcttcgtttattaccgtacctgaactaaacgctataagctctattgtttgagaactctttaaacgatattcttgaaatacatgtaacaaagtttcctttaactcggtcggtttatctaccatagttacagaatttgtatccttatctataatataataatcaaaatcgtataaagttatataattatcgcgttcagattgtgatcttttcaaatagactaaaaaccccatttctctagtaagtatcttatgtatatgtttgtaaaatatcttcatggtgggaatatgctctaccgcagttagccattcctcattgacagcggtagatgtattagacaaaactattccaatgtttaacaagggccattttacgagattattaaatccttgtttgataaatgtagccaatgagggttcgagttcaacgacgattgaattctcttcccgcggatgctgcatgatgaacgacgggatgttgttcgattgatttggaattctttttcgactttttgtttatattaaatattttaaaatttatagctgatagcaattcatgtactacggataatgtagacgcgtattgcgcatcgatatctttattattagataaatttatcaataaatgtgagaagtttgcctcgttaaggtcttccatttaaatattatataaacatttgtgtttgtatcttattcgtcttttatggaatagttttttactagtaaagctgcaattacacactttgtccgtaaaacataaatataaacaccagcttttatcaatcgttccaaaaagtcgacggcggacatttttaacatggcatctattttaaatacacttaggtttttggaaaaaacatcattttataattgtaacgattcaataactaaagaaaagattaagattaaacataagggaatgtcatttgtattttataagccaaagcattctaccgttgttaaatacttgtctggaggaggtatatatcatgatgatttggttgtattggggaaggtaacaattaatgatctaaagatgatgctattttacatggatttatcatatcatggagtgacaagtagtggagcaatttacaaattgggatcgtctatcgatagactttctctaaataggactattgttacaaaagttaataattatgatgatacattttttgacgacgatgattgatcgctattgcacaattttgtttttttactttctaatatagcgtttagattctttttcatgtgcgaatattgatttactaaaatatcgatgtttaacttttgttctatgacgtccttatcagcggtatcggtacatatacgtaattcaccttcacaaaatacggagtcttcgataataatagccaatcgattattggatctagcggtctgtatcatattcaacatgtttaatatatcctttcgtttcccctttacaggcatcgatcgtagcatattttccgcgtctgagatggaaatgttaaaactacaaaaatgcgtaatgttagcccgtcctaatattggtacgtgtctataagtttggcatagtagaataatagacgtgtttaaatgccttccaaagtttaagaattctattagagtattgcattttgatagtttatcgcctacatcatcaaaaataagtaaaaagtgtgctgattttttatgattttgtgcgacagcaatacatttttctatgttacttttagttcgtatcagattatattctagagattcctgactactaacgaaattaatatgatttggccaaatgtatccatcataatctggattataaacgggtgtaaacaagaatatatgtttatattttttaactagtgtagaaaacagagatagtaaatagatagtttttccagatccagatcctcccgttaaaaccattctaaacggcatttttaataaattttctcttgaaaattgtttttcttggaaacaattcataattatatttacagttactaaattaatttgataataaatcaaaatatggaaaactaaggtcgttagtagggaggagaacaaagaaggcatatcgtgatataaataacatttattatcatgatgacaccagaaaacgacgaagagcagacatctgtgttctccgctactgtttacggagacaaaattcagggaaagaataaacgcaaacgcgtgattggtctatgtattagaatatctatggttatttcactactatctatgattaccatgtccgcgtttctcatagtgcgcctaaatcaatgcatgtctgctaacgaggctgctattactgacgccgctgttgccgttgctgctgcatcatctactcatagaaaggttgcgtctagcactacgcaatatgatcacaaagaaagctgtaatggtttatattaccagggttcttgttatatattacattcagactaccagttattctcggatgctaaagcaaattgcactgcggaatcatcaacactacccaataaatccgatgtcttgattacctggctcattgattatgttgaggatacatggggatctgatggtaatccaattacaaaaactacatccgattatcaagattctgatatatcacaagaagttagaaagtatttttgtgttaaaacaatgaactaatatttatttttgtacattaataaatgaaatcgcttaatagacaaactgtaagtaggtttaagaagttgtcggtgccggccgctataatgatgatactctcaaccattattagtggcataggaacatttctgcattacaaagaagaactgatgcctagtgcttgcgccaatggatggatacaatacgataaacattgttatctagataccaacattaaaatgtctacagataatgcggtttatcagtgtcgtaaattacgagctagattgcctagacctgatactagacatctgagagtattgtttagtattttttataaagattattgggtaagtttaaaaaagaccaataataaatggttagatattaataatgataaagatatagatattagtaaattaacaaattttaaacaactaaacagtacgacggatgctgaagcgtgttatatatacaagtctggaaaactggttgaaacagtatgtaaaagtactcaatctgtactatgtgttaaaaaattctacaagtgacaacaaaaaatgaattaataataagtcgttaacgtacgccgccatggacgccgcgtttgttattactccaatgggtgttgactataacagatacattgtatgatgatctcgatatctcaatcatggactttataggaccatacattataggtaacataaaaactgtccaaatagatgtacgggatataaaatattccgacatgcaaaaatgctactttagctataagggtaaaatagttcctcaggattctaatgatttggctagattcaacatttatagcatttgtgccgcatacagatcaaaaaataccatcatcatagcatgcgactatgatatcatgttagatatagaagataaacatcagccattttatctattcccatctattgatgtttttaacgctacaatcatagaagcgtataacctgtatacagctggagattatcatctaatcatcaatccttcagataatctgaaaatgaaattgtcgtttaattcttcattctgcatatcagacggcaatggatggatcataattgatgggaaatgcaatagtaattttttatcataaaagttgtaaagtaaataataaaacaataaatattgaactagtagtacgtatattgagcaatcagaaatgatgctggtacctcttatcacggtgaccgtagttgcgggaacaatattagtatgttatatattatatatttgtaggaaaaagatacgtactgtctataatgacaataaaattatcatgacaaaattaaaaaagataaagagttctaattccagcaaatctagtaaatcaactgatagcgaatcagactgggaggatcactgtagtgctatggaacaaaacaatgacgtagataatatttctaggaatgagatattggacgatgatagcttcgctggtagtttaatatgggataacgaatccaatgttatggcgcctagcacagaacacatttacgatagtgttgctggaagcacgctgctaataaataatgatcgtaatgaacagactatttatcagaacactacagtagtaattaatgaaacggagactgttaaagtacttaatgaagataccaaacagaatcctaactattcatccaatcctttcgtaaattataataaaaccagtatttgtagcaagtcaaatccgtttattacagaacttaacaataaatttagtgagaataatccgtttagacgagcacatagcgatgattatcttaataagcaagaacaagatcatgaacacgatgatatagaatcatcggtcgtatcattggtgtgattagtttcctttttataaaattgaagtaatatttagtattattgctgccgtcacgttgtacaaatggagatattccctgtattcggcatttctaaaattagcaattttattgctaataatgactgtagatattatatagatacagaacatcaaaaaattatatctgatgagatcaatagacagatggatgaaacggtacttcttaccaacatcttaagcgtagaagttgtaaatgacaatgagatgtaccatcttattcctcatagattatcgacgattatactctgtattagttctgtcggaggatgtgttatctctatagataatgacgtcaatggcaaaaatattctaacctttcccattgatcatgctgtaatcatatccccactgagtaaatgtgtcgtagttagcaagggccctacaaccatactggttgctaaagcggatatacccagcaaacgattggtaacatcgtttacaaacgacatactgtatgtaaacaatctatcactgattaattatttgccgttgtctgtattcattattagacgagtcaccgactatttggatagacacatatgcgatcagatatttgctaataataagtggtattcccttataaccatcgacgataagcaatatcctattccatcaaattgtataggtatgtcttctgccaagtacataaattctagcatcgagcaagatactttaatacatgtttgtaacctcgagcatccattcgacttagtatacaaaaaaatgcagtcgtacaattctgtacctatcaaggaacaaatattgtacggtagaattgataatataaatatgagcattagtatttctgtggattaatagatttctagtatggggatcattaatcatctctaatctctaaatacctcataaaacgaaaaaaaagctattatcaaatactgtacggaatagattcattctcttctctttttatgaaactctgttgtatatctactgataaaactggaagcaaaaaatctgataaaaagaataagatcaagatcaaggattatatggaacacgattattataaaataacaatagttcctggttcctcttccacgtctactagctcgtggtattatacacatgcctagtaatagtctctttgcgttgatggaaagcagactagaaataacaggctaaaatgttcagacaccataatagttcccaacccagataataacagagtaccatcaacacattcctttaaactcaatcccaaacccaaaaccgttaaaatgtatccggccaattgatagtagataatgaggtgtacagcgcatgataatttacacagtaaccaaaatgaaaatactttagtaattataagaaatatagatggtaacgtcatcatcaacaatccaataatatgccggagagtaaacattgacggataaaacaaaaatgctccgcataactctatcatggcaataacacaaccaaatacttgtaagattcctaaattagtagaaaatacaacggatatcgatgtataagtgatctcgagaaataataagaataaagtaatgcccgtaaagataaacatcaacattgtttggtaatcattaaaccaattagtatgacgttgaactaatttcacagtaaattttattccagtattatccccgcatgtataagtacctggtaagatatctttatattccataatcaatgagacatcactatctgataacgaatgaagtctagcactagtatgccatttacttaatattgtcgtcttggaagttttattataagttaaaatatcatggttatccaatttccatctaatatactttgtcggattatctatagtacacggaataatgatggtatcattacatgctgtatactctatggtctttgtagttgttataacaaccaacgtatagaggtatatcaacgatattctaactcttgacattttttatttatttaaaatgatacctttgttatttattttattctattttgctaacggtattgaatggcataagtttgaaacgagtgaagaaataatttctacttacttattagacgacgtattatacacgggtgttaatggggcggtatacacattttcaaataataaactaaacaaaactggtttaactaataataattatataacaacatctataaaagtagaggatgcggataaggatacattagtatgcggaaccaataacggaaatcccaaatgttggaaaatagacggttcagacgacccaaaacatagaggtagaggatacgctccttatcaaaatagcaaagtaacgataatcagtcacaacggatgtgtactatctgacataaacatatcaaaagaaggaattaaacgatggagaagatttgacggaccatgtggttatgatttattcacggcggataacgtaattccaaaagatggtttacgaggagcattcgtcgataaagacggtacttatgacaaagtttacattcttttcactgatactatcggctcaaagagaattgttaaaattccgtatatagcacaaatgtgcctaaacgacgaaggtggtccatcatcgttgtctagtcatagatggtcgacgtttctcaaagtcgaattagaatgtgatatcgacggaagaagttatagataaattattcattctaaaactataaaaacagataatgatacgatactatatgtattcttcgatagtccgcattatgtacctattctatgaataccattaaacaatctttttctacgtcaaaattggaaggatatacaaagcaattgccgtctccagctcctggtatatgtctaccagctggaaaagttgttccacataccacgtttgaagtcatagaaaaatataatgtactagatgatattataaagcctttatctaaccaacctatcttcgaaggaccgtctggtgttaaatggttcgatataaaggagaaggaaaatgaacatcgggaatatagaatatacttcataaaagaaaattctatatattcgttcgatacaaaatctaaacaaactcgtagctcgcaagtcgatgcgcgactattttcagtaatggtaacttcgaaaccgttatttatagcagatatagggataggagtaggaatgccacaaatgaaaaaaatacttaaaatgtaatcttaatcgagtacaccacacgacaatgaacaaacataagacagattatgctggttatgcttgctgcgtaatatgcggtctaattgttggaattatttttacagcgacactattaaaagttgtagaacgtaaattagttcatacaccatcaatagataaaacgataaaagatgcatatattagagaagattgtcctactgactggataagctataataataaatgtatccatttatctactgatcgaaaaaacctgggaggaaggacgtaatgcatgcaaagctctaaatccaaattcggatctaattaagatagagactccaaacgagttaagttttttaagaagccttagacgaggctattgggtaggagaatccgaaatattaaaccagacaaccccatataattttatagctaaaaatgccacgaagaatggaactaaaaaacggaaatatatttgtagtacaacgaatactcccaaactgcattcgtgttacactatataacaattacactacatttttatcataacactacttcggttagatgttttagaaaaaaataaatatcgccgtaccgttcttgtttttataaaaataacaattaacaattatcaaattttttctttaatattttacgtggttgaccattcttggtggtaaaataatctcttagtgttggaatggaatgctgtttaatgtttccgcactcatcgtatattttgacgtatgcagtcacatcgtttacgcaatagtcagactgtagttctatcatgcttcctacatcagaaggaggaacagttttaaagtctcttggttttaatctattgccattagttttcatgaaatcctttgttttatccacttcacattttaaataaatgtccactatacattcttctgttaattttactagatcgtcatgggtcatagaatttataggttccgtagtccatggatccaaactagcaaacttcgcgtatacggtatcgcgattagtgtatacaccaactgtatgaaaattaagaaaacagtttaataaatcaacagaaatatttaatcctccgtttgatacagatgcgccatatttatggatttcggattcacacgttgtttgtctgaggtgttcgtctagtgttgcttctacgtaaacttcgattcccatatattctttattgtcagaatcgcataccgatttatcatcatacactgtttgaaaactaaatggtatacacatcaaaataataaataataacgagtacattctgcaatattgttatcgtaattggaaaattagtgttcgagtgagtcggattatgtgagtactggattgtatattttattttatattttgtaataagaataaaatgctaatgtcaagtttattccaatagatgtcttattaaaaaacatatataataaataacaatggctgaatggcataaaattatcgaggatatctcaaaaaataataagttcgaggatgccgccatcgttgattacaagactacaaagaatgttctagctgctattcctaacagaacatttgccaagattaatccgggtgaaattattcctctcatcactaatcgtaatattctaaaacctcttattggtcagaaatattgtattgtatatactaactctctaatggatgagaacacgtatgctatggagttgcttactgggtacgcccctgtatctccgatcgttatagcgagaactcataccgcacttatatttttgatgggtaagccaacaacatccagacgtgatgtgtatagaacgtgtagagatcacgctacccgtgtacgcgcaactggtaattaaaataaaaagtaatattcatatgtagtgtcaattttaaatgatgatgatgaaatggataatatccatattgacgatgtcaataatgccggtattggcatacagctcatcgatttttagatttcattcagaggatgtggaattatgttatgggcatttgtattttgataggatctataatgtagtaaatataaaatataatccgcatattccatatagatataattttattaatcgcacgttaaccgtagatgaactagacgataatgtcttttttacacatggttattttttaaaacacaaatatggttcacttaatcctagtttgattgtctcattatcaggaaacttaaaatataatgatatacaatgctcagtaaatgtatcgtgtctcattaaaaatttggcaacgagtacatctactatattaacatctaaacataagacttattctctacatcggtccacgtgtattactataataggatacgattctattatatggtataaagatataaatgacaagtataatgacatctatgattttactgcaatatgtatgctaatagcgtctacattgatagtgaccatatacgtgtttaaaaaaataaaaatgaactcttaattatgctatgctattagaaatggataaaatcaaaattacggttgattcaaaaattggtaatgttgttaccatatcgtataacttggaaaagataactattgatgttacacctaaaaagaaaaaagaaaaggatgtattattagcgcaatcagttgctgtcgaagaggcaaaagatgtcaaggtagaagaaaaaaatattatcgatattgaagatgacgatgatatggatgtagaaagcgcataatacgatctataaaaataagtatataataaatactttttatttacggtactcttgtagtggtgataccctactcaattatttttttaaaaaaatacttattctgattcttctagccatttccgtgttcgttcgaatgccacatcgacgttaaagataggggagtagttgaaatctagttctgcattgttggtacgcacctcaaatgtagtgttggatatcttcaacgtatagttgttgagtagtgatggttttctaaatagaattctcttcatatcattcttgcacgcgtacatttttagcatccatcttggaattctagatccttgttctattcccaatggtttcatcaatagaagattaaacatatcgtacgaacacgatggagagtaatcgtagcaaaagtaagcatttcctttaatcttagatcccggatactggatatattttgcagccaacacgtgcatccatgcagcatttcctacatatacccggctatgcaccgcgtcatcatcgactgtacgatacataatgttaccgtgttgcttacattgctcgtaaaagactttcgtcaatttgtctccttctccgtaaattccagtgggtcttaggcaacaagtatacaattttgctccattcatgattacggaattattggctttcataaccagttgctcggccatacgtttactttttgcgtatacatgtcctggtgatatatcataaagggtatgctcatggccgatgaatggatcaccgtgtttattgggtcctattgcttccatgctactagtatagatcaaatacttgattcctaggtccacacaagctgccaatatagtctgtgttccataatagtttactttcatgatttcattatcggtgtattttccaaatacatccactagagcagccgtatgaataatcagatttaccccatctagcgcttctctcaccttatcaaagtcgtttatatcacattgtatatagtttataaccttaactttcgaggttattggttgtggatcttctacaatatctatgactctgatttcttgaacatcatctgcactaattaacagttttactatatacctgcctagaaatccggcaccaccagtaaccgcgtacacggccattgctgccactcataatatcagactacttattctattttactaaataatggctgtttgtataatagaccacgataatatcagaggagttatttactttgaaccagtccatggaaaagataaagttttaggatcagttattggattaaaatccggaacgtatagtttgataattcatcgttacggagatattagtcaaggatgtgattccataggcagtccagaaatatttatcggtaacatctttgtaaacagatatggtgtagcatatgtttatttagatacagatgtaaatatatttacaattattggaaaggcgttatctatttcaaaaaatgatcagagattagcgtgtggagttattggtatttcttacataaatgaaaagataatacattttcttacaattaacgagaatggcgtttgatatatcagttaatgcgtctaaaacaataaatgcattagtttacttttctactcagcaaaataaattagtcatacgtaatgaagttaatgatacacactacactgtcgaatttgatagggacaaagtagttgacacgtttatttcatataatagacataatgacaccatagagataagaggggtgcttccagaggaaactaatattggttgcgcggttaatacgccggttagtatgacttacttgtataataagtatagttttaaactgattttagcagaatatataagacacagaaatactatatccggcaatatttattcggcattgatgacactagatgatttggctattaaacagtatggagacattgatctattatttaatgagaaacttaaagtagactccgattcgggactatttgactttgtcaactttgtaaaggatatgatatgttgtgattctagaatagtagtagctctatctagtctagtatctaaacattgggaattgacaaataaaaagtataggtgtatggcattagccgaacatatatctgatagtattccaatatctgagctatctagactacgatacaatctatgtaagtatctacgcggacacactgagagcatagaggatgaatttgattattttgaagacgatgattcgtctacatgttctgccgtaaccgacagggaaacggatgtataattttttttatagcgtgaaggatatgataaaaaatataattgttgtatttatcccattccaatcaccttatatgattctgtaaaaaaattatactgtaacacaataaaggagtcttatagatgtatagaggtcagatactggtttgataaactgtttattccacataagtatgtttgactttatggttagacccgcatactttaacaaatcactgaaaattggagttaggtattgacctctcagaatcagttgccgttctggaacattaaatgtattttttatgatatactccaacgcatttatgtgggcatacaacaagtcattactaatggagtattccaagagttttagttgtctagtatttaacaagagaagagatttcaacagactgtttatgaactcgaacgccgcctcattgtcgcttatattgatgatgtcgaattctcccaatatcatcactgatgagtagctcatcttgttatcgggatccaagttttctaaagatgtcattaaaccctcgatcatgaatggatttatcatcatcgtttttatgttggacatgagcttagtccgtttgtccacatctatagacgacgatttctgaattatttcatatatccctctctttaactccaggaacttgtcaggatggtctactttaatatgttctcgtctaagagatgaaaatctttggatggttgcacgcgacttttctttaaaggatgacgttgcccaagatcctctcttaaatgaatccatcttatccttggacaagatggacagtctattttccttagatggtttaatatttttgttacccatgatctataaaggtagacctaatcgtctcggatgaccatatatttattttcagttttattatacgcataaattgtaaaaaatatgttaggtttacaaaaatgtctcgtggggcattaatcgtttttgaaggattggacaaatctggaaaaacaacacaatgtatgaacatcatggaatctataccggcaaacacgataaaatatcttaactttcctcagagatccactgtcactggaaagatgatagatgactatctaactcgtaaaaaaacctataatgatcatatagttaatctattattttgtgcaaatagatgggagtttgcatcttttatacaagaacaactagaacagggaattactttaatagttgatagatacgcattttctggagtagcgtatgccgccgctaaaggcgcgtcaatgactctcagtaagagttatgaatctggattgcctaaacccgacttagttatattcttggaatctggtagcaaagaaattaatagaaacgtcggcgaggaaatttatgaagatgttacattccaacaaaaggtattacaagaatataaaaaaatgattgaagaaggagatattcattggcaaattatttcttctgaattcgaggaagatgtaaagaaggagttgattaagaatatagttatagaggctatacacacggttactggaccagtggggcaactgtggatgtaatagtgaaattacattttttataaatagatgttagtacagtgttataaatggatgaagcatattactctggcaacttggaatcagtactcggatacgtgtccgatatgcataccgaactcgcatcaatatctcaattagttattgccaagatagaaactatagataatgatatattaaacaaggacattgtaaattttatcatgtgtagatcaaacttggataatccatttatctctttcctagatactgtatatactattatagatcaagagatctatcagaccgaattgattaattcattagacgacaatgaaattatcgattgtatagttaacaagtttatgagcttttataaggataacctagaaaatatagtagatgctatcattactctaaaatatataatgaataatccagattttaaaactacgtatgccgaagtactcggttccagaatagccgatatagatattaaacaagtgatacgtaagaatatactacaattgtctaatgatatccgcgaacgatatttgtgaaaaatattaaaaaaaaatactttttttattaaatgacgtcgcttcgcgaatttagaaaattatgctgtgatatatatcacgcatcaggatataaagaaaaatctaaattaattagagactttataacagatagggatgataaatatttgatcattaagctattgcttcccggattagacgatagaatttataacatgaacgataaacaaattataaaattatatagtataatatttaaacaatctcaggaagatatgctacaagatttaggatacggatatataggagacactattaggactttcttcaaagagaacacagaaatccgtccacgagataaaagcattttaactttagaagaagtggatagttttttaactacgttatcatccgtaactaaagaatcgcatcaaataaaattattgactgatgtagcatctgtttgtacatgtaatgatttaaaatgtgtagtcatgcttattgataaagatctaaaaattaaagcgggccctcggtacgtacttaacgctattagtcctcatgcctatgatgtgtttagaaaatctaataacttgaaagagataatagaaaatgcatctaaacaaaatctagactctatatctatttctgttatgactccaattaatcccatgttagcggaatcgtgtgattctgtcaataaggcgtttaaaaaatttccatcaggaatgtttgcggaagtcaaatacgatggtgaaagagtacaagttcataaaaataataacgagtttgccttctttagtagaaacatgaaaccagtactctctcataaagtggattatctcaaagaatacataccgaaagcatttaaaaaagctacgtctatcgtattggattctgaaattgttcttgtagacgaacataatgtaccgctaccgtttggaagtttaggaatacacaaaaagaaagaatataaaaactctaacatgtgtttgttcgtgtttgactgtttgtactttgatggattcgatatgacggacattccattgtacgaacgaagatcttttctcaaagatgttatggttgaaatacccaatagaatagtattctcagagttgacgaatattagtaacgagtctcagttaactgacgtattggatgatgcactaacgagaaaattagaaggattggtcttaaaagatattaatggagtatacgaaccgggaaagagaagatggttaaaaataaagcgagactatttgaacgagggttccatggcagattctgccgatttagtagtactaggtgcctactatggtaaaggagcaaagggtggtatcatggcagtctttctaatgggttgttacgacgatgaatccggtaaatggaagacggttaccaagtgttcaggacacgatgataatacgttaagggagttgcaagaccaattaaagatgattaaaattaacaaggatcccaaaaaaattccagagtggttagtagttaataaaatctatattcccgattttgtagtagaggatccgaaacaatctcagatatgggaaatttcaggagcagagtttacatcttccaagtcccataccgcaaatggaatatccattagatttcctagatttactaggataagagaggataaaacgtggaaagaatctactcatctaaacgatttagtaaacttgactaaatcttaatagttacatacaaactgaaaattaaaataacaccatttagttggtggtcgccatggatggtgttattgtatactgtctaaacgcgttagtaaaacatggcgaggaaataaatcatataaaaaatgatttcatgattaaaccatgttgtgaaagagtttgtgaaaaagtcaagaacgttcacattggcggacaatctaaaaacaatacagtgattgcagatttgccatatatggataatgcggtatccgatgtatgcaattcactgtataaaaagaatgtatcaagaatatccagatttgctaatttgataaagatagatgacgatgacaagactcctactggtgtatataattattttaaacctaaagatgttattcctgttatcatatctataggaaaggataaagatgtctgtgaactattaatctcatcagacatatcgtgtgcatgcgtggagttaaattcatatcacgtagccattcttcccatgaatgtttccttttttaccaaaggaaatgcctcgttgattattctcctgtttgatttctctatcgatgcagcacctctcttaagaagtgtaaccgataataatgttattatatctagacaccagcgtctacatgacgagcttccgagttccaattggttcaagttttacataagtataaagtccgactattgttctatattatatatggttgttgatggatctgtgatgcatgcgatagctgataatagaactcacgcaattattagcaaaaatatattagacaatactacaattaacgatgagtgtagatgctgttattttgaaccacagattaggattcttgatagagatgagatgctcaatggatcatcgtgtgatatgaacagacattgtattatgatgaatttacctgatgtaggcgaatttggatctagtatgttggggaaatatgaacctgacatgattaagattgctctttcggtggctggtaatttaataagaaatcgagactacattcccgggagacgaggctatagctactacgtttacggtatagcctctagataatttttttaagcacgaaataaaaaacataattttaaaccaatctatttcatactattttgtgtgatcaccatggacataaagatagatattagtatttctggtgataaatttacggtgactactaggagggaaaatgaagaaagaaaaaaatatctacctctccaaaaagaaaaaactactgatgttatcaaacctgattatcttgagtacgatgacttgttagatagagatgagatgtttactattctagaggaatattttatgtacagaggtctattaggcctcagaataaaatatggacgactctttaacgaaattaaaaaattcgacaatgatgcggaagaacaattcggtactatagaagaactcaagcagaaacttagattaaattctgaagagggagcagataactttatagattatataaaggtacaaaaacaggatatcgtcaaacttactgtatacgattgcatatctatgataggattgtgtgcatgcgtggtagatgtttggagaaatgagaaactgttttctagatggaaatattgtttacgagcgattaaactgtttattaatgatcacatgcttgataagataaaatctatactgcagaatagactagtatatgtggaaatgtcatagaaagttaatgagagcaaaaatatataaggttgtattccatatttgttattttttctgtaatagttaaaaaaatacattcgatggtctatctatcagattattatgtgttataaggtactttttctcataataaactagagtatgagtaagatagtgtttttcaaaacatataaatctaaaattgatggatgagatatacagctattaatttcgaaaatatataaatctaaaattgatggataagatatacagctattaatttcgaaaatatattttaatctgataactttaaacatggatttttgatggtggtttaacgttttaaaaaaagattttgttattgtagtatatgataatattaaaagatggatataaagaatttgctgactgcatgtactattttttacattactacattggctacggcagatatacctactccgccaccaacgggtcatgtgacaagggagaatatcttgataagaggcataatcaatgttgtaatcggtgtccacctggagaatttgccaaggttagatgtaatggtaacgataacacaaaatgtgaacgctgcccacctcatacatataccacaatccccaattattctaatggatgtcatcaatgtagaaaatgcccaaccggatcatttgataaggtaaagtgtaccggaacacagaacagtaaatgttcgtgtcttcctggttggtattgcgctactgattcttcacagactgaagattgttgaaattgtgtaccaaaaaggagatgtccatgcggatactttggtggaatagatgaacaaggaaatcctatttgtaaatcgtgctgtattggtgaatattgcaactacctacgtaattatagacttgatccattttctccatgcaaactatctaaatgtaattaattatgattttgatgataatgttaccatacattatatcgctacttggttagtgtattattcagtatgaagacctattaataattacttatcttttgacgatcttgttataattataatataaaaacttatggcatagtaactcataattgctgacgcgataaattcgtaataatctgttttgttcaaatttttataaggaatctacaggcataaaaataaaaatataatttataatatactcttacagcgcgccatcatgaatagcagcagtaaattaattgctgttattaatggatttagaaatagtggacgattttgtgatattaatatagttattaatgatgaaaggataaacgctcacagactcatcctatctggagcctccgaatatttttccattctgttttccaataattttatcgattctaatgaatacgaagttaatctaagtcatttagattatcaaagtgttaacgatttgatcgattacatttatgggatacctttgagcctaactaacgataacgtgaaatatattctttcaaccgctgattttttacaaattggatctgccattactgagtgcgaaaaatacatacttaaaaatctttgttctagaaactgtatcgatttctacatatacgctgataaatataataacaagaaaatagaatcagcgtcgtttaacacaatattacgaaatattttgagactcatcaacgatgaaaactttaaatacttaacagaggaatcaatgataaaaattttaagcgatgatatgttaaatataaaaaatgaggattttgcaccactaattctcattaaatggttagagagtactcaacaatcatgcaccgtcgagttacttagatgcctcagaatatcattgctttccccacaagttataaaatcactttatagtcatcaactggttagttcaatctacgaatgtataacattcttaaacaatatagcattcttggatgaatcatttcctagataccatagcatcgagttgatatctatcggtataagtaattcgcatgataagatttccataaactgctacaatcataaaaaaaatacatgggaaatgatatcttcacgtagatataggtgtagtttcgcagtggccgtcctggataatattatctatatgatgggtggatatgatcagtccccgtatagaagttcaaaggttatagcgtacaatacatgtacaaattcttggatatatgatataccagagctaaaatatcctcgttctaattgtgggggactggctgatgacgaatacatttattgtataggcggcatacgcgatcaggattcatcgttgacatctagtattgatagatggaagccatcaaaaccatattggcagaagtatgctaaaatgcgcgaaccaaaatgtgatatgggggttgcgatgttaaacggattaatatatgtcatgggtggaatcgttaaaggtgacacgtgtaccgacgcactagagagtttatcagaagatggatggatgaagcatcaacgtcttccaataaaaatgtccaatatgtcgacgattgttcatgatggcaagatttatatatctggaggttacaacaatagtagtgtagttaatgtaatatcgaatctagtccttagctataatccgatatatgatgaatggaccaaattatcatcattaaacattcctagaattaatcccgctctatggtcagcgcataataaattatatgtaggaggaggaatatctgatgatgttcgaactaatacatctgaaacatacgataaagaaaaagattgttggacattggataatggtcacgtgttaccacgcaattatataatgtataaatgcgaaccgattaaacataaatatccattggaaaaaacacagtacacgaatgattttctaaagtatttggaaagttttataggtagttgatagaacaaaatacataattttgtaaaaataaatcactttttatactaatatgacacgattaccaatacttttgttactaatatcattagtatacgctacaccttttcctcagacatctaaaaaaataggtgatgatgcaactctatcatgtaatcgaaataatacaaatgactacgttgttatgagtgcttggtataaggagcccaattccattattcttttagctgctaaaagcgacgtcttgtattttgataattataccaaggataaaatatcttacgactctccatacgatgatctagttacaactatcacaattaaatcattgactgctagagatgccggtacttatgtatgtgcattctttatgacatcaactacaaatgacactgataaagtagattatgaagaatactccacagagttgattgtaaatacagatagtgaatcgactatagacataatactatctggatctacacattcaccagaaactagttctgagaaaccagaggatatagataattttaattgctcgtcggtattcgaaatcgcgactccggaaccaattactgataatgtagaagatcatacagacaccgtcacatacactagtgatagcattaatacagtaagtgcatcatctggagaatccacaacagacgagactccggaaccaattactgataaagaagaagatcatacagtcacagacactgtctcatacactacagtaagtacatcatctggaattgtcactactaaatcaaccaccgatgatgcggatctttatgatacgtacaatgataatgatacagtaccaccaactactgtaggcggtagtacaacctctattagcaattataaaaccaaggactttgtagaaatatttggtattaccgcattaattatattgtcggccgtggcaatattctgtattacatattatatatataataaacgttcacgtaaatacaaaacagagaacaaagtctagatttttgacttacataaatgtctgggatagtaaaatctatcatattgagcggaccatctggttcaggaaagacagccatagccaaaagactatgggaatatatttggatttgtggtgtcccataccactagatttcctcgtcctatggaacgagaaggtgtcgattaccattacgttaacagagaggccatctggaagggaatagccgccggaaactttctagaacatactgagtttttaggaaatatttacggaacttctaaaactgctgtgaatacagcggctattaataatcgtatttgtgtgatggatctaaacatcgatggcgttagaagtcttaaaaatacgtacctaatgccttactcggtgtatataagacctacctctcttaaaatggttgagaccaagcttcgttgtagaaacactgaagcggatgatgagattcatcgtcgtgtgatgttggcaaaaactgacatggatgaggcaggtgaagccggtctattcgacactattatcattgaagatgatgtgaatttagcatatagtaagttaattcagatactacaggaccgtattagaatgtattttaacactaattagagacttaagacttaaaacttgataattaataatataactcgtttttatatgtggctatttcaacgtctaatgtattagttaaatattaaaacttaccacgtaaaacttaaaatttaaaatgatatttcattgacagatagatcacacattatgaactttcaaggacttgtgttaactgacaattgcaaaaatcaatgggtcgttggaccattaataggaaaaggtggattcggtagtatttatactactaatgacaataattatgtagtaaaaatagagcccaaagctaacggatcattatttaccgaacaggcattttatactagagtacttaaaccatccgttatcgaagaatggaaaaaatctcacaatataaagcacgtaggtcttatcacgtgcaaggcatttggtctatacaaatccattaatgtggaatatcgattcttggtaattaatagattaggtgcagatctagatgcggtgatcagagccaataataatagattaccaaaaaggtcggtgatgttgatcggaatcgaaatcttaaataccatacaatttatgcacgagcaaggatattctcacggagatattaaagcgagtaatatagtcttggatcaaatagataagaataaattatatctagtggattacggattggtttctaaattcatgtctaatggcgaacatgttccatttataagaaatccaaataaaatggataacggtactctagaatttacacctatagattcgcataaaggatacgttgtatctagacgtggagatctagaaacacttggatattgtatgattagatggttgggaggtatcttgccatggactaagatatctgaaacaaagaattgtgcattagtaagtgccacaaaacagaaatatgttaacaatactgcgactttgttaatgaccagtttgcaatatgcacctagagaattgctgcaatatattaccatggtaaactctttgacatattttgaggaacccaattacgacgagtttcggcacatattaatgcagggtgtatattattaagtgtggtgtttggtcgatgtaaaatttttgtcgataaaaattaaaaaataacttaatttattattgatctcgtgtgtacaaccgaaatcatggcgatgttttacgcacacgctctcggtgggtacgacgagaatcttcatgcctttcctggtacctgcagcggccgctcgagagctcctggtaaaagttaaacttggggagaatgatacagaaaatctttcttctactatatcggcggcaccatcgaggtaaccacctctcaagaagaccgcgtgaataatgtactcatgaaacgtttggaaactatacgccatatgtggtctgttgtatatgatcattttgatattgtgaatggtaaagaatgctgttatgtgcatacgcattcatctaatcaaaatcctataccgagtactgtaaaaacaaatttgtacatgaagactatgggatcatgcattcaaatggattccatggaagctctagagtatcttagcgaactgaaggaatcaggtggatggagtcccagaccagaaatgcaggaatttgaatatccagatggagtggaagacactgaatcaattgagagattggtagaggagttcttcaatagatcagaacttcaggctggtaaattagtcaaatttggtaattctattaattgttaaacatacatctgtttcagctaagcaactaagaacacgtatacggcagcagcttccttttatactctcatcttttaccaacacaaagggtggatatttgttcattggagttgataataatacacacaaagtatttggattcacggtgggttacgactacctcagactgatagagaatgatatagaaaagcatatcaaaagactttgtgttgtgcatttctgtgagaagaaagaggacatcaagtacacgtgtcgattcatcaaggtatataaacctggggatgaggctacctcgacatacgtgtgcgctatcaaagtggaaagatgctgttgtgctgtgtttgcagattggccagaatcatggtatatggatactaatggtatcaagaagtattctccagatgaatgggtgtcacatataaaattttaattaatgtaactatagagaacaaataataggttgtaatatcatatagacaataactaacaattaattagtaactgttatctcttttttaactaaccaactaactatatacctattaatacatcgtaattatagttcttaacatctattaatcattgattcgcttctttaattttttataaactaacattgttaattgaaaagggataacatgttacagaatataaattatatatggatttttttaaaaaggaaatacttgactggagtgtatatttatctcttcattatatagcacgcgtgtgttccaattcttccacatcccatataatacaggattataatctcgttcgaacatacgagaaagtggataaaacaatagttgattttttatctaggttgccaaatttattccatattttagaatatggggaaaatattctacatatttattctatggatgatgctaatacgaatattataattttttttctagatagagtattaaatattaataagaacgggtcatttatacacaatctcaggttatcatcatccattaatataaaagaatatgtatatcaattagttaataatgatcatccagataataggataagactaatgcttgaaaatggacgtagaacaagacattttttgtcctatatatcagatacagttaatatctatatatgtattttaataaatcatggattttatatagatgcagaagacagttacggttgtacattattacatagatgtatatatcactataagaaatcagaatcagaatcatacaatgaattaattaagatattgttaaataatggatccgatgtagataaaaaagatacgtacggaaacacaccttttatcctattatgtaaacacgatatcaacaacgtggaattgtttgagatatgtttagagaatgctaatatagactctgtagactttaatagatatacacctcttcattatgtctcatgtcgtaataaatatgattttgtaaagttattaatttctaaaggagcaaatgttaatgcgcgtaataaattcggaactactccattttattgtggaattatacacggtatctcgcttataaaactatatttggaatcagacacagagttagaaatagataatgaacatatagttcgtcatttaataatttttgatgctgttgaatctttagattatctattatccagaggagttattgatattaactatcgtactatatacaacgaaacatctatttacgacgctgtcagttataatgcgtataatacgttggtctatctattaaacagaaatggtgattttgagacgattactactagtggatgtacatgtatttcggaagcagtcgcaaacaacaacaaaataataatggaagtactattgtctaaacgaccatctttgaaaattatgatacagtctatgatagcaattactaaaaataaacaacataatgcagatttattgaaaatgtgtataaaatatactgcgtgtatgaccgattatgatactcttatagatgtacagtcgctacagcaatataaatggtatattttaaaatgtttcgatgaaatagatatcatgaagagatgttatataaaaaataaaactgtattccaattagttttttgtatcaaagacattaatactttaatgagatatggtaaacatccttctttcgtgaagtgcactagtctcgacgtatacggaagtcgtgtacgtaatatcatagcatctattagatatcgtcagagattaattagtctattatccaagaagctggatgcgggagataaatggtcgtgttttcctaacgaaataaaatataaaatattggaaaactttaacgataacgaactatccacatatctaaaaatcttataaacactattaaaatataaaatctaagtaggataaaatcacactacatcattgtttccttttagtgctcgacagtgtatactatttttaacactcataaataaaaatgaaaacgatttccgttgttacgttgttatgcgtactacctgctgttgtttattcaacatgtactgtacccactatgaataacgctaaattaacgtctaccgaaacatcgtttaatgataaacagaaagttacatttacatgtgatcagggatatcattctttggatccaaatgctgtctgcgaaacagataaatggaaatacgaaaatccatgcaagaaaatgtgcacagtttctgattatgtctctgaattatatgataagccattatacgaagtgaattccaccatgacactaagttgcaacggcgaaacaaaatattttcgttgcgaagaaaaaaatggaaatacttcttggaatgatactgttacgtgtcctaatgcggaatgtcaacctcttcaattagaacacggatcgtgtcaaccagttaaagaaaaatactcatttggggaatatatgactatcaactgtgatgttggatatgaggttattggtgcttcgtacataagttgtacagctaattcttggaatgttattccatcatgtcaacaaaaatgtgatataccgtctctatctaatggattaatttccggatctacattttctatcggtggcgttatacatcttagttgtaaaagtggttttatactaacgggatctccatcatccacatgtatcgacggtaaatggaatcccatactcccaacatgtgtacgatctaacgaaaaatttgatccagtggatgatggtcccgacgatgagacagatttgagcaaactctcgaaagacgttgtacaatatgaacaagaaatagaatcgttagaagcaacttatcatataatcatagtggcgttaacaattatgggcgtcatatttttaatctccgttatagtattagtttgttcctgtgacaaaaataatgaccaatataagttccataaattgctaccgtaaatataaatccgttaaaataattaataatttaataacaaacaagtatcaaaagattaaagacttatagctagaatcaattgagatgtcttcttcagtggatgttgatatctacgatgccgttagagcatttttactcaggcactattataacaagagatttattgtgtatggaagaagtaacgccatattacataatatatacaggctatttacaagatgcgccgttataccgttcgatgatatagtacgtactatgccaaatgaatcacgtgttaaacaatgggtgatggatacacttaatggtataatgatgaatgaacgcgatgtttctgtaagcgttggcaccggaatactattcatggaaatgtttttcgattacaataaaaatagtatcaacaatcaactaatgtatgatataattaatagcgtatctataattctagctaatgagagatatagaagcgcttttaacgacgatggtatatacatccgtagaaatatgattaacaagttgtacggatacgcatctctaactactattggcacgatcgctggaggtgtttgttattatctgttgatgcatctagttagtttgtataaataattatttcaatatactagttaaaattttaagattttaaatgtataaaaaactaataacgtttttatttgtaataggtgcattagcatcctattcgaataatgagtacactccgtttaataaactgagtgtaaaactctatatagatggagtagataatatagaaaattcatatactgatgataataatgaattggtgttaaattttaaagagtacacaatttctattattacagagtcatgcgacgtcggatttgattccatagatatagatgttataaacgactataaaattattgatatgtataccattgactcgtctactattcaacgcagaggtcacacgtgtagaatatctaccaaattatcatgccattatgataagtacccttatattcacaaatatgatggtgatgagcaacaatattctattactgcagagggaaaatgctataaaggaataaaatatgaaataagtatgatcaacgatgatactctattgagaaaacatactcttaaaattggatctacttatatatttgatcgtcatggacatagtaatacatattattcaaaatatgatttttaaaaatttaaaatatattatcacttcagtgacagtagtcaaataacaaacaacaccatgagatatattataattctcgcagttttgttcattaatagtatacacgctaaaataactagttataagtttgaatccgtcaattttgattccaaaattgaatggactggggatggtctatacaatatatcccttaaaaattatggcatcaagacgtggcaaacaatgtatacaaatgtaccagaaggaacatacgacatatccgcatttccaaagaatgatttcgtatctttctgggttaaatttgaacaaggcgattataaagtggaagagtattgtacgggactatgcgtcgaagtaaaaattggaccaccgactgtaacattgactgaatacgacgaccatatcaatttgtacatcgagcatccgtatgctactagaggtagcaaaaagattcctatttacaaacgcggtgacatgtgtgatatctacttgttgtatacggctaacttcacattcggagattctaaagaaccagtaccatatgatatcgatgactacgattgcacgtctacaggttgcagcatagactttgtcacaacagaaaaagtgtgcgtgacagcacagggagccacagaagggtttctcgaaaaaattactccatggagttcgaaagtatgtctgacacctaaaaagagtgtatatacatgcgcaattagatccaaagaagatgttcccaatttcaaggacaaaatggccagagttatcaagagaaaatttaataaacagtctcaatcttatttaactaaatttctcggtagcacatcaaatgatgttaccacttttcttagcatgcttaacttgactaaatattcataactaatttttattaatgatacaaaaacgaaataaaactgcatattatacactggttaacgcccttataggctctaaccattttcaagatgaggtccctgattatagtccttctgttcccctctatcatctactccatgtctattagacgatgtgagaagactgaagaggaaacatggggattgaaaatagggttgtgtataattgccaaagatttctatcccgaaagaactgattgcagtgttcatctcccaactgcaagtgaaggattgataactgaaggcaatggattcagggatatacgaaacaccgataaattataaaaaaagcaatgtgtccgctgtttccgttaataatactattttcgtaactggcggattattcataaataactctaatagcacgatcgtggttaacaatatggaaaaacttgacatttataaagacaaacaatggtcgattatagaaatgcctatggctagggtatatcacggcatcgactcgacatttggaatgttatattttgccggaggtctatccgttaccgaacaatatggtaatttagagaaaaacaacgagatatcttgttacaatcctagaacgaataagtggtttgatatttcatatactatttataagatatccatatcatcattgtgtaaactaaataacgtcttctatgtatttagtaaggacattggatatgtggaaaagtatgatggtgcatggaagttagtacatgatcgtctccccgctataaaggcattatcaacttctccttattgattgaaaatgaaaatataaatagtttttatgtatagcagtattaccctatagttttattgcttactactaacatggatacagatgttacaaatgtagaagatatcataaatgaaatagatagagagaaagaagaaatactaaaaaatgtagaaattgaaaataataaaaacattaacaagaatcatccaagtggatatattagagaagcactcgttattaatacaagtagtaatagtgattccattgataaagaagttatagaatgtatcagtcacgatgtaggaatatagatcatatctactaatttttataatcgatacaaaacataaaaaacaactcgttattacatagcaggcatggaatccttcaagtattgttttgataacgatggcaagaaatggattatcggaaatactttatattctggtaattcaatactatataaggtcagaaaaaatttcactagttcgttctacaattacgtaatgaaaatagatcacaaatcacacaagccattgttgtctgaaatacgattctatatatctgtattggatcctttgactatcgacaactggacacgggaacgtggtataaagtatttggctattccagatctgtatggaattggagaaaccgatgattatatgttcttcgttataaagaattcgggaagagtattcgccccaaaggatactgaatcagtcttcgaagcatgcgtcactatgataaacacgttagagtttatacactctcgaggatttacccatggaaaaatagaaccgaggaatatactgattagaaataaacgtctttcactaattgactattctagaactaacaaactatacaagagtggaaactcacatatagattacaacgaggacatgataacttcaggaaatatcaattatatgtgtgtagacaatcatcttggagcaacagtttcaaaacgaggagatttagaaatgttgggatattgcatgatagaatggttcggtggcaaacttccatggaaaaacgaaagtagtataaaagtaataaaacaaaaaaaagaatataaaaaatttatagctactttctttgaggactgttttcctgaaggaaatgaacctctggaattagttagatatatagaattagtatacacgttagattattctcaaactcctaattatgacagactacgtaaactgtttatacaagattgaaattatattctttttttatagagtgtggtagtgttacggatatctaatattaatattagactatctctatcgcgctacacgaccaatatcgattactatggatatcttcagggaaatcgcatcttctatgaaaggagagaatgtattcatttctccagcgtcaatctcgtcagtattgacaatactgtattatggagctaatggatccactgctgaacagctatcaaaatatgtagaaacggaggagaacacggataaggttagcgctcagaatatctcattcaaatccatgaataaagtatatgggcgatattctgccgtgtttaaagattcctttttgagaaaaattggcgataagtttcaaactgttgacttcactgattgtcgcactatagatgcaatcaacaagtgtgtagatatctttactgaggggaaaatcaatccactattggatgaaccattgtctcctgatacctgtctcctagcaattagtgccgtatactttaaagcaaaatggttgatgccattcgaaaaggaatttaccagtgattatcccttttacgtatctccgacggaaatggtagatgtaagtatgatgtctatgtacggcaaggcatttaatcacgcatctgtaaaggaatcattcggcaacttttcaatcatagaactgccatatgttggagatactagtatgatggtcattcttccagacaagattgatggattagaatccatagaacaaaatctaacagatacaaattttaagaaatggtgtaactctctggaagctacgtttatcgatgttcacattcccaagtttaaggtaacaggttcgtataatcttgtggatactctagtaaagtcaggactgacagaggtgttcggttcaactggagattatagcaatatgtgtaattcagatgtgagtgtcgacgctatgattcacaaaacgtatatagatgtcaatgaagagtatacagaagcagctgcagcaacttgtgcactggtgtcagactgtgcatcaacaattacaaatgagttctgtgtagatcatccgttcatctatgtgattaggcatgttgatggaaaaattcttttcgttggtagatattgctctccgacaactaattgttaaccattttttttaaaaaaatagaaaaaacatgtggtattagtgcaggtcgttgttcttccaattgcaattggtaagatgacggccaactttagtacccacgtcttttcaccacagcactgtggatgtgacagactgaccagtattgatgacgtcagacaatgtttgactgaatatatttattggtcgtcctatgcataccgcaacaggcaatgcgctggacagttgtattccacactcctctcttttagagatgatgcggaatcagtgttcatcgacattcgcgagctggtaaaaaatatgccgtgggatgatgtcaaagattgtacagaaatcatccgttgttatataccggatgagcaaaaaaccatcagagagatttcggccatcatcggactttgtgcatatgctgctacttactggggaggtgaagaccatcccactagtaacagtctgaacgcattgtttgtgatgcttgagatgctcaattacgtggattataacatcatattccggcgtatgaattgatgagttgtacatcttgacattttctttcttctcttctccctttcttctcttctcccttcctccctcttctccctttcccagaaacaaacttttttacccactataaaataaaatgagtatactacctattatatttcttcctatatttttttattcttcattcgttcagacttttaacgcgcctgaatgtatcgacaaagggcaatattttgcatcattcatggagttagaaaacgagccagtaatcttaccatgtcctcaaataaatacgctatcatccggatataatatattagatattttatgggaaaaacgaggagcggataatgatagaattataccgatagataatggtagcaatatgctaattctgaacccgacacaatcagactctggtatttatatatgcattaccacgaacgaaacctactgtgacatgatgtcgttaaatttgacaatcgtgtctgtctcagaatcaaatatagatcttatctcgtatccacaaatagtaaatgagagatctactggcgaaatggtatgtcccaatattaatgcatttattgctagtaacgtaaacgcagatattatatggagcggacatcgacgccttagaaataagagacttaaacaacggacacctggaattattaccatagaagatgttagaaaaaatgatgctggttattatacatgtgttttagaatatatatacagaggtaaaacatataacgtaaccagaattgtaaaattagaggtacgggataaaataataccttctactatgcaattaccagatggcattgtaacttcaataggtagtaatttgactattgcgtgtagagtatcgttgagacctcccacaacggatgcagacgtcttttggataagtaatggtatgtattacgaagaagatgatggggacggagacggtagaataagtgtagcaaataaaatctatatgaccgataagagacgtgttattacatcccggttaaacattaatcctgtcaaggaagaagatgctacaacgtttacgtgtatggcgtttactattcctagcatcagcaaaacagttactgttagtataacgtgaatgtatgttgttacatttccatgtcaattgagtttataagaatttttatacattatcttccaacaaacaattgacgaacgtattgctatgattaactcccacgatactatgcatattattaatcattaacttgcagactatacctagtgctattttgacatactcatgttcttgtgtaattgcggtatctatattattaaagtacgtaaatctagctatagttttattatttaattttagataatataccgtctccttatttttaaaaattgccacatcctttattaaatcatgaatgggaatttctatgtcatcgttagtatattgtgaacaacaagagcagatatctataggaaagggtggaatgcgatacattgatctatgtagttttaaaacacacgcgaactttgaagaatttatataaatcattccatcgatacatccttctatgttgacatgtatatatccaggaattcttttattaatgtcaggaaatgtataaactaaaacattgcccgaaagcggtgcctctatctgcgttatatccgttcttaacttacaaaatgtaaccaatacctttgcatgacttgttttgttcggcaacgttagtttaaacttgacgaatggattaattacaatagcatgatccgcgcatctattaagtttttttactttaacgcccttgtatgtttttacagagactttatctaaatttctagtacttgtatgtgttataaatataacgggatatagaactgaatcacctaccttagatacccaattacattttatcagatccagataataaacaaattttgtcgccctaactaattctatattgttatatattttacaattggttatgatatcatgtaataacttggagtctaacgcgcatcgtcgtacgtttatacaattgtgatttagtgtagtatatctacacatgtatttttccgcactatagtattctggactagtgataaaactatcgttatatctgtcttcaatgaactcatcgagatattgctctctgtcatattcatacacctgcataaactttctagacatcttacaatccgtgttattttaggatcatatttacatatttacgggtatatcaaagatgttagattagttaatgggaatcgtctataataatgaatattaaacaattatatgaggacttttaccacaaagcatcataaaaatgagtcgtcgtctgatttatgttttaaatatcaaccgcaaatcaactcataaaatacaagagaatgaaatatatacatattttagtcattgcaatatagaccatacttctacagaacttgattttgtagttaaaaactatgatctaaacagacgacaacatgtaactgggtatactgcactacactgctatttgtataataattactttacaaacgatgtactgaagatattattaaatcatgacgtaaatgtaacgatgaaaaccagtagcggacgtatgcctgtttatatattgcttactagatgttgcaatatttcacatgatgtagtgatagatatgatagacaaagataaaaaccacttattacatagagactattccaacctattactagagtatataaaatctcgttacatgttattaaaggaagaggatatcgatgagaacatagtatccactttattagataagggaatcgatcctaactttaaacaagacggatatacagcgttacattattattatttgtgtctcgcacacgtttataaaccaggtgagtgtagaaaaccgataacgataaaaaaggccaagcgaattatttctttgtttatacaacatggagctaatctaaacgcgttagataattgtggtaatacaccattccatttgtatcttagtattgaaatgtgtaataatattcatatgactaaaatgctgttgacttttaatccgaatttcaaaatatgtaataatcatggattaacgcctatactatgttatataacttccgactacatacaacacgatattcttgttatgttaatacatcactatgaaacaaatgttggagaaatgccgatagatgagcgtcgtatgatcgtattcgagtttatcaaaacatattctacacgtccggcagattcgataacttatttgatgaataggtttaaaaatataaatatttatacccgctatgaaggaaagacattattacacgtagcatgtgaatataataatacacacgtaatagattatcttatacgtatcaacggagatataaatgcgttaaccgacaataacaaacacgctacacaactcattatagataacaaagaaaattccccgtataccatcgattgtttactgtatatacttagatatattgtagataagaatgtgataagatcgttggtggatcaacttccatctctacctatcttcgatataaaatcatttgagaaattcatatcctactgtatacttttagatgacacattttacgataggcacgttaagaatcgcgattctaaaacgtatcgatacgcattttcaaaatacatgtcgtttgataaatacgatggtataataactaaatgtcacgacgaaacaatgttactcaaactgtccactgttctagacactacactatatgcagttttaagatgccataattcgaaaaagttaagaagatacctcaacgagttaaaaaaatataataacgataagtcctttaaaatatattctaatattatgaatgagagataccttaatgtatattataaagatatgtacgtgtcaaaggtatatgataaactatttcctgttttcacagataaaaattgtctactaacattactaccttcagaaattatatacgaaatattatacatgctgacaattaacgatctttataatatatcgtatccacctaccaaagtatagttgtatttttctcatgcgatgtgtgtaaaaaaactgatattatataaatattttagtgccgtataataaagatgacgatgaaaatgatggtacatatatatttcgtatcattattgttattgctattccacagttacgccatagacatcgaaaatgaaatcacagaattcttcaataaaatgagagatactctaccagctaaagactctaaatggttgaatccagcatgtatgttcggaggcacaatgaatgatatagccgctctaggagagccattcagcgcaaagtgtcctcctattgaagacagtcttttatcgcacagatataaagactatgtggttaaatgggagaggctagaaaagaatagacggcgacaggtttctaataaacgtgttaaacatggtgatttatggatagccaactatacatctaaattcagtaaccgtaggtatttgtgtaccgtaactacaaagaatggtgactgtgttcagggtatagttagatctcatattaaaaaacctccttcatgcattccaaaaacatatgaactaggtactcatgataagtatggcatagacttatactgtggaattctttacgcaaaacattataataatataacttggtataaagataataaggaaattaatatcgacgacattaagtattcacaaacgggaaagaaattaattattcataatccagagttagaagatagtggaagatacaactgttacgttcattacgacgacgttagaatcaagaatgatatcgtagtatcaagatgtaaaatacttacggttataccgtcgcaagaccacaggtttaaactaatactagatccaaaaatcaacgtaacgataggagaacctgccaatataacatgcactgctgtgtcaacgtcattattgattgacgatgtactgattgaatgggaaaatccatccggatggcttataggattcgattttgatgtatactctgttttaactagtagaggcggtattaccgaggcgaccttgtactttgaaaatgttactgaagaatatataggtaatacatataaatgtcgtggacacaactattattttgaaaaaacccttacaactacagtagtattggagtaaatacacaatgcatttttatatacattactgaataattattattattatttatatcgtatttgtgctataacgcgactatctaggtatttgtatctcactgatagagaacatataaatatagactctattaaacagttgtgtaaaatatcaaatcctaatagatgtggatgtacggctttacatgagtacttttataattatagatcagtcaacggaaaatacaagtatagatacaacggttactatcaatattatttatctagcgattatgaaaattataatgaatattattatgatgattatgatagaactggtatgaacagtgagagtgataatatatcaatcaaaacagaatatgaattctatgatgaaacacaagatcaaagtacacaactagtaggttacgacattaaactcaaaaccaatgaggatgattttatggctatgatagatcagtgggtgtccatgattatatagatgaatcaattaataaagtagtatatggaagagagtctcacgtaagatggcgggatatatggcaagaacataatgatggcgtatacagtataggaaaggagtgcatagataatatatacgaagacaaccataccgtagacgaattctacaagatagacagcgtatcagatgtagatgacgcggaacacatatctccgataactaatgatgtatctacacaaacatgggaaaagaaatcagagttagatagatacatggaaatgtatcctcgtcatagatatagtaagcattctgtctttaagggattttctgacaaagttagaaaaaatgatttagacatgaatgtggtaaaagaattactttctaacggtgcatctctaacaattaaggatagcagtaataaggatccaataaccgtttattttcgaagaacgataatgaatttagaaatgattgatattattaacaaacatacaactattgatgaacgaaagtatatagtacactcctatctaaaaaattataaaaatttcgattatccatttttcaggaagttagttttgactaataaacattgtctcaacaattattataatataagcgacagcaaatatggaacaccgctacatatattggcgtctaataaaaaattaataactcctaattacatgaagttattagtgtataacggaaatgatataaacgcacgaggtgaagatacacaaatgcgaactccattacacaaatatttgtgtaaatttgtatatcataatattgaatatggtatccgatactataatgaaaagattatagacgcatttatagagttaggagccgatctaactattccaaataacgatggaatgataccagtagtttactgtatacactcaaatgcagaatatggttataacaatattactaacataaagataatacgtaaactacttaatcttagtagacgtgcgtcacataatctatttagagatcgagtcatgcacgattatataagtaatacatatattgatcttgagtgtttagatattattagatcgttggatggattcgatatcaatggttactttgaaggacgtacaccacttcattgcgctatacaacataacttcactcagattgctaagtacttattagatcgaggagctgatatagtcgtacccaacacattgattatacatcagtacatacagtaaatagcatagatatggaggaggatacaaatatttcaaataaagttataaggtacaacactgtcaataatatatggaagacattacctaacttctggactggaactataaatccaggcgtggtctcgcataaagatgatatatatgttgtatgcgacatcaaagatgaaaaaaatgttaagacttgtatatttagatataacacgaatacgtataacggatgggaattggttacgacgacagaaagcagattatcagctctgcatactattcttcatgacaataccataatgatgttacattgttatgaatcgtatatgttacaagatacatttaatgtgtacactcgcgaatggaatcatatgtgtcatcaacattcgaatagttatatcatgtacaatatactacccatctactaaatataatagaataaaataaatgagtatgatcattttagataacgattgattttatcattaccgcttcattcttatattctttgcttacggaacctatatttagaaacatctactaacgattttttatgcttgcattattaatggtatgtaatatgattgattgtgtacgcaataccaatttgttaagtatgaatacggggtacaaacataaactgaaatttaacattatttatttatgatatatatcgttatcgttattgtttggtctataccatggatatctttaaagaactaatcttaaaacaccctgatgaaaatgttttgatttctccagtttctattttatctactttatctattctaaatcatggagcagctggttctacagctgaacaactatcaaaatatatagagaatatgaatgagaatacacccgatgataagaaggatgacaataatgacatggacgtagatattccgtattgtgcgacactagctaccgcaaataaaatatacggtagcgatagtatcgagttccacgcctccttcctacaaaaaataaaagacgattttcaaactgtaaactttaataatgctaaccaaacaaaggaactaatcaacgaatgggttaagacgatgacaaatggtaaaattaattccttattgactagtccgctatccattaatactcgtatgacagttgttagcgccgtccattttaaagcaatgtggaaatatccattttctaaacatcttacatatacagacaagttttatatttctaagaatatagttaccagtgttgatatgatggtgggtaccgagaataacttgcaatatgtacatattaatgaattattcggaggattctctattatcgatattccatacgagggaaactctagtatggtaattatactaccggacgacatagaaggtatatataacatagaaaaaaatataacagatgaaaaatttaaaaaatggtgtggtatgttatctactaaaagtatagacttgtatatgccaaagtttaaagtggaaatgacagaaccgtataatctggtaccgattttagaaaatttaggacttactaatatattcggatattatgcagattttagcaagatgtgtaatgaaactatcactgtagaaaaatttctacatacgacgtttatagatgttaatgaggagtatacagaagcatcggccgttacaggagtatttatgactaacttttcgatggtatatcgtacgaaggtctacataaaccatccattcatgtacatgattaaagacaacacaggacgtatactttttatagggaaatactgctatccgcaataaatataaacaaatagacttttatcacgtttatctatgtctaaatattacaaatagtaatagtataaactaaagctgataatacttaaaaaaataataatatcatttacaattaatagtataaactaaaaattaaacaaatcgttattataagtaatatcaaaatgatgatatacggattaatagcgtgtcttatattcgtgacttcatccatcgctagtccactttatattcccgttattccacccattacggaagataaatcgttcaatagtgtagaggtattagtttccttgtttagagatgaccaaaaagactatacggtaacttctcagttcaataactacactatcgataccaaagactggactatcggcgtactatccacacctgatggtttggatataccattgactaatataacttattggtcacggtttactataggtcgtgcattgttcaaatcagagtctgaggatattttccaaaagaaaatgagtattctaggtgtttctatagaatgtaagaagtcgtcgacattacttacttttttgaccgtgcgtaaaatgactcgagtatttaataaatttccagatatggcttattatcgaggagactgtttaaaagccgtttatgtaacaatgacttataaaaatactaaaactggagagactgattacacgtacctctctaatggggggttgcctgcatactatcgtaatggggtcgatggttgattattgattagtatattccttattcacacaaaaagaacatttttataaacatgaaaccactgtctaaatgtaattatgatcttgatttatagatgaagatcagcctttagaggattttaaccagtatgtttaatatgaaaaaaataaacataacatattttgagattaagcgctattgtgcttaattattttgctctataaactgaatatatagccacaattattgacgggcttgtttatgaccggcaatcatgaatttacagaaattatctctggctatatatcttactgcgacatgttcgtggtgttatgaaacatgcataagaaaaactgcgttgtatcatgacattcaattggagcatgtagaagacaataaagatagtgtagcgtcgctaccgtacaagtagtcaatcaaagagaacgtagtagattgttggctacatttaattggacagatatagctgagggtgttagaaatgagttcattaaaatatgtgatatcaacggaacatatttatataattatactattgctgttagtataattattgattccacggaagaactaccaacagttactccaattacaacaacatatgaaccttctacatataattatactatcgatgatagcactgttattactactgaagaactacaagtgactcctcatatggatctccatcgatgatacatgtattaaaatactttccgaataagtcttttaaatattgtattaattatgaaaaactatgctatgcgagtatgatgcaaagatgtttaatgatacgatactagattttatctctagcgagagatgtcgttagaatcatttatcataactacgtttaataataattcatcaacgaatatcgataacatgtgtcatttatacgttaaagtctgtccgtcttctctattgtttagactgtttgtagaatgctgtgatataaacaaactagtagaaggtacgactccgttacactgttatctaatgaatgaaggatttgaatcatctgttttaaaaaacctattaaaggagtatgtcatgaatacgtttaatgttcatgacatccattacacaaatatttaactcatgatgaagttgagaatgatatgctttctgatagtatagatagctttagctaatataaaaatatattaatccactatatattctagacttgatttaaaaccgataaactactactacgtactgtataagttgttaaaaaaaggagcagaccctaattatgtagatgatagaggtaatacttttcttcattacttctgcatctatatgtccacttatgagaaaacgtcatttaataagatgcatcgtgaaaagaaatttattaaagagttggtaaaatatgaaaccgaaagtaaataatataggaaatacacctctacataactacgtatctcaatatgatatcactctcattcctcatccacaacccattaaaaaaatggaaattaaagccctctattagcataaacggctacaggtctacctttacaatggcctctccttgtgcccagttcagaccctgtcattgccacgctactaaggactccctgaataccgtggccgacgtcagacattgtctgactgaatacatcctgtgggtttctcatagatggacccatagagaaagcgcagggtctctctacaggcttctcatctctttcagaactgatgcaacggagctctttggtggtgagttgaaggattcacttccgtgggacaatatcgacaattgcgtggagatcattaaatgtttcatcagaaatgactccatgaaaaccgccgaagaacttcgtgcaatcattggactttgtactcaatcagctatcgtctctggaagagtcttcaacgataagtatatcgacatactacttatgctgcgaaagattctgaacgagaacgactatctcaccctcttggatcatatccgcactgctaaatactaaatctccttcatgctctctcactacactttttatcatcttatgaggaatgattgccttcatcatttttcgtgaaataggaataattagcaccagaatagctatggattgcacatgtattctatgtcgtctactggatgaagatgtgacgtacaaaaaaataaaactagaaattgaaacgtgtcacaacttatcaaaacatatagatagacgaggaaacaatgcgctacattgttacgtcttcaataaatgcgatacagacattaagattgttcgactgttactctctcgcggagtcgagagactttgtagaaacaacgaaggattaactccgctaggagcatacagtaagcatagatacgtaaaatctcaaattgtgcatctactgatatccagctattcgaattcctctaacgaactcaagtcgaatataaatgatttcgatctgtattcgtatatgtcttcggataatatcgacttacgtctgctaaaatacctaattgtggataaacggatacgtccgtccaagaatacgaattatgcaatcaatggtctcggattggtggatatatacgtaacgacgcctaatccgagaccagaagtattgctatggcttcttaaatcagaatgttacagcaccggttacgtatttcgtacctgtatgtacgacagtgatatgtgtaagaactctcttcattactatatatcgtctcatagagaatctcaatctctatccaaggatgtaattaaatgtttgatcaataacaatgtttccatccatggcagagacgaaggaggatctttacccatccaatactactggtcttgctcaaccatagatatagagattgttaaattattaataaaggatgtggacacgtgtagagtatacgacgtcagccctatattagaggcggattatctaaacaagcgatttagagtaaccccatataatgtagacatggaaatcgttaatcttcttattgagagacgtcatactcttgtcgacgtaatgcgtagtattacttcttacgattccagagactataaccactacatcatcgataacattctaaagagatttagacaacaggatgaatccatcgtacaagccatgttgataaactacttacattacggcgatatggtcgttcgatgcatgttagataacggacaacaactatcctctgcacgactactttgttaataataatctcgtcgatgtaaacgtcgtaaggtttatcgtggaaaataatggacacatggctgtaaatcacgtatcgaacaatggccgtctatgtatgtacggtctgatattatcgagatttaataattgcgggtatcactgttatgaaaccatactaatagatgtatttgatatactaagcaagtacatggataatatagatatgatcgataatgagaataaaactctactatattacgcggtcgatgtcaataatatacaatttgcaaagcggttattggaatatggagcgagtgttacaacatcacgctcgataatcaatacggccatccagaaaagtagttacagaagagaaaacaaaacgaggatagttgatttattacttagctaccatcccactctagagactatgattgacgcatttaatagagatatacgctatctatatcctgaaccattattcgcctgtatcagatacgccttaatcctagatgatgattttccttctaaagtaagtatgatatctccggtcgtcataaggaactaaagcgctatagagtagacattaatagaatgaagaatgcctacatatcaggcgtctccatgtttgatatattatttaaacgaagcaaacgccacagattgagatacgcaaagaatccgacatcaaatggtacaaaaaagaactaacgtccatcattacagaaactgtaaagaacaatgagaggatcgactccatagtggacaacattaatacagacgataacttgatttcgaaattacccatggagatactttattactccattaaataatttatcatggagcgataatgtcctgtttcatttgtttccatgacatattacaaaatcgattccgtccaagatgataaaaacatttaccggcatcataaacacggagtttattttatatgtctcgcataaacattactaaaaaaatatattgttcggttttctttcacatctttaattatgaaaaagtaaatcattatgagatggacgagattgtacgcatcgttcgcgacagtatgtggtacatacctaacgtatttatggacgacggtaagaatgaaggtcacgtttctgtcaacaatgtttgtcatatgtattttacgttctttgatgtggatacatcgtctcatctgtttaagctagttattaaacactgcgatctgaataaacgaggtaactctccattacattgctatacgatgaatacacgatttaatccatctgtattaaagatattgttacaccacggcatgcgtaactttgatagcaaggatgaaaaaggacatattcctctacaccactatctgattcattcactatcaatcgataacaagatctttgatatactaacggacaccattgatgactttagtaaatcatccgatctattgctgtgttatcttagatataaattcaatgggagcttaaactattacgttctgtacaaaggatccgaccctaattgcgtcgacgaggatggactcacttctcttcattactactgtaaacacatatccacgttctacaaaagcaattattacaagttaagtcacactaagatgcgagccgagaagcgattcatctacgcgataatagattatggagcaaacattaacgcggttacacacttaccttcaacagtataccaaacatagtcctcgtgtggtgtatgctcttttatctcgaggagccgatacgaggatacgtaataatcttgattgtacacccatcatggaacgattgtgcaacaggtcatattctcataatgttactcaattggcacgaacaaaaggaagaaggacaacatctactttatctattcataaaacataatcaaggatacactctcaatatactacggtatctactagataggttcgacattcagaaagacgaatactataataccgcctttcaaaattgtaacaacaatgttgcctcatacatcggatacgacatcaaccttccgactaaagacggtattcgacttggtgtttgaaaacagaaacatcatatacaaggcggatgttgtgaatgacatcatccaccacagactgaaagtatctctacctatgattaaatcgttgttctacaagatgtcagaattctctccctacgacgattactacgtaaaaaagatactagcctactgcctattaagggacgagtcattcgcggaactacatagtaaattctgtttaaacgaggactataaaagtgtatttatgaaaaatatatcattcgataagatagattccatcatcgtgacataagtcgccttaaagagattcgaatctccgacaccgacctgtatacggtatcacagctatcttaaagccatacattcggacagacacatttcatttcccatgtacgacgatctcatagaacagtgccatctatcgatggagcataaaagtaaactcgtcgacaaagcactcaataaattagagtctaccatcggtcaatctagactatcgtatttgcctccggaaattatgcgcaatatcatctaaacagtatgttgtacggaaagaaccattacaaatattatccatgatagaaagaaaatatctatatgattggagaagtaggaaacaggaacaagacgacgattactacattattaaatcatgaagtccgtattatactcgtatatattgtttctctcatgtataataataaacggaagagatatagcaccgcatgcaccatccgatggaaagtgtaaagacaacgaatacaaacgccataatttgtgtccgggaacatacgcttccagattatgcgatagcaagactaacacacgatgtacaccctgtggttcgggtaccttcacatctcgcaataatcatttacccgcttgtctaagttgtaacggaagacgcgatcgtgtaacacgactcacaatagaatctgtgaatgctctcccggatattattgtcttctcaaaggatcatccggatgcaaggcatgtgtttcccaaacaaaatgtggaataggatacggagtatccggagacgtcatctgttctccgtgtggtctcggaacatattctcacaccgtctcttccgcagataaatgcgaacccgtacccagtaatacctttaactatatcgatgtggaaattaatctgtatcccgtcaacgacacgtcgtgtactcggacgaccactaccggtctcagtgaatccatctcaacgtcggaactaactattactatgaatcataaagactgtaatcccgtatttcgtgaggaatacttctctgtccttaataaggtagcaacttcaggtttctttacaggagaaaggtgtgcactctgaatttcgagattaaatgcaataacaaagattcttcctccaaacagttaacgaaagcaaagaatgatgacggtatcatgccgcattcggagacagtaactctagtgggcgactgtatatctagcgtcgacatctatatactatatagtaataccaatactcaagactacgaaactgatacaatctcttatcatgtgggtaatgttctcgatgtcgatagccatatgcccggtagttgcgatatacataaactgatcactaattccaaacccacccgctttttatagtaagtttttcacccataaataataaatacaataattaatttctcgtaaaagtagaaaatatattctaatttattgcatggtaaggaagtagaatcataaagaacagtactcaatcaatagcaattatgaaacaatatatcgtcctggcatgcatgtgcctgccagtcttcagcaatcatcctcatcctcatcctcgtgtacggaagaagaaaacaaacatcatatgggaatcgatgttattatcaaagtcacaaagcaagaccaaacaccgaccaatgataagatttgccaatccgtaacggaaattacagagtccgagtcagatccaaatcccgaggtggaatcagaagatgattccacatcagtcgaggatgtagatcctcctaccacttattactccatcatcggtggaggtctgagaatgaactttggattcaccaaatgtcctcagattaaatccatctcagaatccgctgatggaaacacagtgaatgctagattgtccagcgtgtccccaggacaaggtaaggactctcccgcgatcactcatgaagaagctcttgctatgatcaaagactgtgaggtgtctatcgacatcagatgtagcgaagaagagaaagacagcgacatcaagacccatccagtactcgggtctaacatctctcataagaaagtgagttacgaagatatcatcggttcaacgatcgtcgatacaaaatgtgtcaagaatctagagtttagcgttcgtatcggagacatgtgcaaggaatcatctgaacttgaggtcaaggatggattcaagtatgtcgacggatcggcatctgaaggtgcaaccgatgatacttcactcatcgattcaacaaaactcaaagcgtgtgtctgaatcgataactctattcatctgaaattggatgagtagggttaatcgaacgattcaggcacaccacgaattaaaaaagtgtaccggacactatattccggtttgcaaaacaaaaatgttcttaactacattcacaaaaagttacctctcgcgacttcttctttttctgtctcaatagtgtgatacgattatgacactattcctattcctattcctatttcctttcagggtatcacaaaaatattaaacctctttctgatggtctcataaaaaaagttttacaaaaatatttttattctctttctctctttgatggtctcataaaaaaagttttacaaaaatatttttattctctttctctctttgat
